(19) United States
(12) Patent Application Publication
(10) Pub. No.: US 2003/0170255 A1
(43) Pub. Date: Sep. 11, 2003

(54) Compositions and methods for the therapy and diagnosis of lung cancer

(75) Inventors: Yoshihiro Watanabe, Mercer Island, WA (US); Robert A. Henderson, Edmonds, WA (US); Michael D. Kalos, Seattle, WA (US); Paul R. Sleath, Seattle, WA (US); Thomas S. Vedvick, Federal Way, WA (US); Darrick Carter, Seattle, WA (US); Gary R. Fanger, Mill Creek, WA (US)

Correspondence Address: SEED INTELLECTUAL PROPERTY LAW GROUP PLLC, 701 FIFTH AVE, SUITE 6300, SEATTLE, WA, 98104-7092, US

(73) Assignee: Corixa Corporation, Seattle, WA

(21) Appl. No.: 10/113,872

(22) Filed: Mar. 28, 2002

Related U.S. Application Data
(63) Continuation-in-part of application No. 10/017,754, filed on Oct. 29, 2001.
Application No. 10/017,754 is a continuation-in-part of application No. 09/902,941, filed on Jul. 10, 2001.
Application No. 09/902,941 is a continuation-in-part of application No. 09/849,626, filed on May 3, 2001.
Application No. 09/849,626 is a continuation-in-part of application No. 09/736,457, filed on Dec. 13, 2000, now Pat. No. 6,509,448.
Application No. 09/736,457 is a continuation-in-part of application No. 09/702,705, filed on Oct. 30, 2000, now Pat. No. 6,504,010.
Application No. 09/702,705 is a continuation-in-part of application No. 09/677,419, filed on Oct. 6, 2000.
Application No. 09/677,419 is a continuation-in-part of application No. 09/671,325, filed on Sep. 26, 2000.
Application No. 09/671,325 is a continuation-in-part of application No. 09/658,824, filed on Sep. 8, 2000.
Application No. 09/658,824 is a continuation-in-part of application No. 09/651,563, filed on Aug. 29, 2000.
Application No. 09/651,563 is a continuation-in-part of application No. 09/614,124, filed on Jul. 11, 2000.
Application No. 09/614,124 is a continuation-in-part of application No. 09/589,184, filed on Jun. 5, 2000.
Application No. 09/589,184 is a continuation-in-part of application No. 09/560,406, filed on Apr. 27, 2000.
Application No. 09/560,406 is a continuation-in-part of application No. 09/546,259, filed on Apr. 10, 2000, now abandoned.
Application No. 09/546,259 is a continuation-in-part of application No. 09/533,077, filed on Mar. 22, 2000, now abandoned.
Application No. 09/533,077 is a continuation-in-part of application No. 09/519,642, filed on Mar. 6, 2000.
Application No. 09/519,642 is a continuation-in-part of application No. 09/476,300, filed on Dec. 30, 1999.
Application No. 09/476,300 is a continuation-in-part of application No. 09/466,867, filed on Dec. 17, 1999.
Application No. 09/466,867 is a continuation-in-part of application No. 09/419,356, filed on Oct. 15, 1999, now abandoned.
Application No. 09/419,356 is a continuation-in-part of application No. 09/346,492, filed on Jun. 30, 1999, now abandoned.

(51) Int. Cl. A61K 39/00

(52) U.S. Cl. 424/185.1

(57) ABSTRACT

Compositions and methods for the therapy and diagnosis of cancer, particularly lung cancer, are disclosed. Illustrative compositions comprise one or more lung tumor polypeptides, immunogenic portions thereof, polynucleotides that encode such polypeptides, antigen presenting cell that expresses such polypeptides, and T cells that are specific for cells expressing such polypeptides. The disclosed compositions are useful, for example, in the diagnosis, prevention and/or treatment of diseases, particularly lung cancer.

### CROSS-REFERENCE TO RELATED APPLICATIONS

[0001] This application is a continuation-in-part of U.S. patent application Ser. No. 10/017,754, filed Oct. 29, 2001, now pending; which is a continuation-in-part of U.S. patent application Ser. No. 09/902,941, filed Jul. 10, 2001, now pending; which is a continuation-in-part of U.S. patent application Ser. No. 09/849,626, filed May 3, 2001, now pending; which is a continuation-in-part of U.S. patent application Ser. No. 09/736,457, filed Dec. 13, 2000, now pending; which is a continuation-in-part of U.S. patent application Ser. No. 09/702,705, filed Oct. 30, 2000, now pending; which is a continuation-in-part of U.S. patent application Ser. No. 09/677,419, filed Oct. 6, 2000, now pending; which is a continuation-in-part of U.S. patent application Ser. No. 09/671,325, filed Sep. 26, 2000, now pending; which is a continuation-in-part of U.S. patent application Ser. No. 09/658,824, filed Sep. 8, 2000, now pending; which is a continuation-in-part of U.S. patent application Ser. No. 09/651,563, filed Aug. 29, 2000, now pending; which is a continuation-in-part of U.S. patent application Ser. No. 09/614,124, filed Jul. 11, 2000, now pending; which is a continuation-in-part of U.S. patent application Ser. No. 09/589,184, filed Jun. 5, 2000, now pending; which is a continuation-in-part of U.S. patent application Ser. No. 09/560,406, filed Apr. 27, 2000, now pending; which is a continuation-in-part of U.S. patent application Ser. No. 09/546,259, filed Apr. 10, 2000, now pending; which is a continuation-in-part of U.S. patent application Ser. No. 09/533,077, filed Mar. 22, 2000, now pending; which is a continuation-in-part of U.S. patent application Ser. No. 09/519,642, filed Mar. 6, 2000, now pending; which is a continuation-in-part of U.S. patent application Ser. No. 09/476,300, filed Dec. 30, 1999, now pending; which is a continuation-in-part of U.S. patent application Ser. No. 09/466,867, filed Dec. 17, 1999, now pending; which is a continuation-in-part of U.S. patent application Ser. No. 09/419,356, filed Oct. 15, 1999, now pending; which is a continuation-in-part of U.S. patent application Ser. No. 09/346,492, filed Jun. 30, 1999, now pending, which applications are incorporated herein by reference in their entirety.

### STATEMENT REGARDING SEQUENCE LISTING

[0002] The Sequence Listing associated with this application is provided on CD-ROM in lieu of a paper copy, and is hereby incorporated by reference into the specification. Three CD-ROMs are provided, containing identical copies of the sequence listing: CD-ROM No. 1 is labeled COPY 1, contains the file 478C19.app.txt which is 1.4 MB and created on Mar. 28, 2002; CD-ROM No. 2 is labeled COPY 2, contains the file 478C19.app.txt which is 1.4 MB and created on Mar. 28, 2002; CD-ROM No. 3 is labeled CRF contains the file 478C19.app.txt which is 1.4 MB and created on Mar. 28, 2002.

### TECHNICAL FIELD OF THE INVENTION

[0003] The present invention relates generally to therapy and diagnosis of cancer, such as lung cancer. The invention is more specifically related to polypeptides, comprising at least a portion of a lung tumor protein, and to polynucleotides encoding such polypeptides. Such polypeptides and polynucleotides are useful in pharmaceutical compositions, e.g., vaccines, and other compositions for the diagnosis and treatment of lung cancer.

### BACKGROUND OF THE INVENTION

[0004] 1. Field of the Invention

[0005] Cancer is a significant health problem throughout the world. Although advances have been made in detection and therapy of cancer, no vaccine or other universally successful method for prevention or treatment is currently available. Current therapies, which are generally based on a combination of chemotherapy or surgery and radiation, continue to prove inadequate in many patients.

[0006] 2. Description of Related Art

[0007] Lung cancer is the primary cause of cancer death among both men and women in the U.S., with an estimated 172,000 new cases being reported in 1994. The five-year survival rate among all lung cancer patients, regardless of the stage of disease at diagnosis, is only 13%. This contrasts with a five-year survival rate of 46% among cases detected while the disease is still localized. However, only 16% of lung cancers are discovered before the disease has spread.

[0008] Early detection is difficult since clinical symptoms are often not seen until the disease has reached an advanced stage. Currently, diagnosis is aided by the use of chest x-rays, analysis of the type of cells contained in sputum and fiberoptic examination of the bronchial passages. Treatment regimens are determined by the type and stage of the cancer, and include surgery, radiation therapy and/or chemotherapy.

[0009] In spite of considerable research into therapies for this and other cancers, lung cancer remains difficult to diagnose and treat effectively. Accordingly, there is a need in the art for improved methods for detecting and treating such cancers. The present invention fulfills these needs and further provides other related advantages.

### SUMMARY OF THE INVENTION

[0010] In one aspect, the present invention provides polynucleotide compositions comprising a sequence selected from the group consisting of:

[0011] (a) sequences provided in SEQ ID NO:1-323, 341-782, 784-785, 788, 790, 792, 794, 796, 800-804, 807, 808, 810-826, 828-1664, 1668, 1669, 1676, 1680-1805, 1823, 1824, 1826-1829, 1861, 1862, 1865-1868, 1873, 1875, 1877, 1879, 1881, 1883, 1891-1900, 1910, 1914, 1918, 1922-1924, 1931, 1933, 1938, 1941, 1974-2002, and 2003;

[0012] (b) complements of the sequences provided in SEQ ID NO:1-323, 341-782, 784-785, 788, 790, 792, 794, 796, 800-804, 807, 808, 810-826, 828-1664, 1668, 1669, 1676, 1680-1805, 1823, 1824, 1826-1829, 1861, 1862, 1865-1868, 1873, 1875, 1877, 1879, 1881, 1883, 1891-1900, 1910, 1914, 1918, 1922-1924, 1931, 1933, 1938, 1941, 1974-2002, and 2003;

[0013] (c) sequences consisting of at least 20, 25, 30, 35, 40, 45, 50, 75 and 100 contiguous residues of a sequence provided in SEQ ID NO:1-323, 341-782, 784-785, 788, 790, 792, 794, 796, 800-804, 807, 808, 810-826, 828-1664, 1668, 1669, 1676, 1680-1805, 1823, 1824, 1826-1829, 1861, 1862, 1865-1868, 1873, 1875, 1877, 1879, 1881, 1883, 1891-1900, 1910, 1914, 1918, 1922-1924, 1931, 1933, 1938, 1941, 1974-2002, and 2003;

[0014] (d) sequences that hybridize to a sequence provided in SEQ ID NO:1-323, 341-782, 784-785, 788, 790, 792, 794, 796, 800-804, 807, 808, 810-826, 828-1664, 1668, 1669, 1676, 1680-1805, 1823, 1824, 1826-1829, 1861, 1862, 1865-1868, 1873, 1875, 1877, 1879, 1881, 1883, 1891-1900, 1910, 1914, 1918, 1922-1924, 1931, 1933, 1938, 1941, 1974-2002, and 2003, under moderate or highly stringent conditions;

[0015] (e) sequences having at least 75%, 80%, 85%, 90%, 95%, 96%, 97%, 98% or 99% identity to a sequence of SEQ ID NO:1-323, 341-782, 784-785, 788, 790, 792, 794, 796, 800-804, 807, 808, 810-826, 828-1664, 1668, 1669, 1676, 1680-1805, 1823, 1824, 1826-1829, 1861, 1862, 1865-1868, 1873, 1875, 1877, 1879, 1881, 1883, 1891-1900, 1910, 1914, 1918, 1922-1924, 1931, 1933, 1938, 1941, 1974-2002, and 2003;

[0016] (f) degenerate variants of a sequence provided in SEQ ID NO:1-323, 341-782, 784-785, 788, 790, 792, 794, 796, 800-804, 807, 808, 810-826, 828-1664, 1668, 1669, 1676, 1680-1805, 1823, 1824, 1826-1829, 1861, 1862, 1865-1868, 1873, 1875, 1877, 1879, 1881, 1883, 1891-1900, 1910, 1914, 1918, 1922-1924, 1931, 1933, 1938, 1941, 1974-2002, and 2003.

[0017] In one preferred embodiment, the polynucleotide compositions of the invention are expressed in at least about 20%, more preferably in at least about 30%, and most preferably in at least about 50% of lung tumors samples tested, at a level that is at least about 2-fold, preferably at least about 5-fold, and most preferably at least about 10-fold higher than that for normal tissues.

[0018] The present invention, in another aspect, provides polypeptide compositions comprising an amino acid sequence that is encoded by a polynucleotide sequence described above.

[0019] The present invention further provides polypeptide compositions comprising an amino acid sequence selected from the group consisting of sequences recited in SEQ ID NO:324-340, 783, 786, 787, 789, 791, 793, 795, 797-799, 805, 806, 809, 827, 1667, 1670-1675, 1677-1679, 1806-1822, 1825, 1830-1833, 1834-1856, 1863, 1864, 1869-1872, 1874, 1876, 1878, 1880, 1882, 1884-1890, 1901-1909, 1913, 1917, 1921, 1925-1930, 1932, 1934, 1937, 1940, 1942-1973, 2004, and 2005-2011.

[0020] In certain preferred embodiments, the polypeptides and/or polynucleotides of the present invention are immunogenic, i.e., they are capable of eliciting an immune response, particularly a humoral and/or cellular immune response, as further described herein.

[0021] The present invention further provides fragments, variants and/or derivatives of the disclosed polypeptide and/or polynucleotide sequences, wherein the fragments, variants and/or derivatives preferably have a level of immunogenic activity of at least about 50%, preferably at least about 70% and more preferably at least about 90% of the level of immunogenic activity of a polypeptide sequence set forth in SEQ ID NO:324-340, 783, 786, 787, 789, 791, 793, 795, 797-799, 805, 806, 809, 827, 1667, 1670-1675, 1677-1679, 1806-1822, 1825, 1830-1833, 1834-1856, 1863, 1864, 1869-1872, 1874, 1876, 1878, 1880, 1882, 1884-1890, 1901-1909, 1913, 1917, 1921, 1925-1930, 1932, 1934, 1937, 1940, 1942-1973, 2004, and 2005-2011 or a polypeptide sequence encoded by a polynucleotide sequence set forth in SEQ ID NO:1-323, 341-782, 784-785, 788, 790, 792, 794, 796, 800-804, 807, 808, 810-826, 828-1664, 1668, 1669, 1676, 1680-1805, 1823, 1824, 1826-1829, 1861, 1862, 1865-1868, 1873, 1875, 1877, 1879, 1881, 1883, 1891-1900, 1910, 1914, 1918, 1922-1924, 1931, 1933, 1938, 1941, 1974-2002, and 2003.

[0022] The present invention further provides polynucleotides that encode a polypeptide described above, expression vectors comprising such polynucleotides and host cells transformed or transfected with such expression vectors.

[0023] Within other aspects, the present invention provides pharmaceutical compositions comprising a polypeptide or polynucleotide as described above and a physiologically acceptable carrier.

[0024] Within a related aspect of the present invention, the pharmaceutical compositions, e.g., vaccine compositions, are provided for prophylactic or therapeutic applications. Such compositions generally comprise an immunogenic polypeptide or polynucleotide of the invention and an immunostimulant, such as an adjuvant.

[0025] The present invention further provides pharmaceutical compositions that comprise: (a) an antibody or antigen-binding fragment thereof that specifically binds to a polypeptide of the present invention, or a fragment thereof; and (b) a physiologically acceptable carrier.

[0026] Within further aspects, the present invention provides pharmaceutical compositions comprising: (a) an antigen presenting cell that expresses a polypeptide as described above and (b) a pharmaceutically acceptable carrier or excipient. Illustrative antigen presenting cells include dendritic cells, macrophages, monocytes, fibroblasts and B cells.

[0027] Within related aspects, pharmaceutical compositions are provided that comprise: (a) an antigen presenting cell that expresses a polypeptide as described above and (b) an immunostimulant.

[0028] The present invention further provides, in other aspects, fusion proteins that comprise at least one polypeptide as described above, as well as polynucleotides encoding such fusion proteins, typically in the form of pharmaceutical compositions, e.g., vaccine compositions, comprising a physiologically acceptable carrier and/or an immunostimulant. The fusions proteins may comprise multiple immunogenic polypeptides or portions/variants thereof, as described herein, and may further comprise one or more polypeptide segments for facilitating the expression, purification and/or immunogenicity of the polypeptide(s).

[0029] Within further aspects, the present invention provides methods for stimulating an immune response in a patient, preferably a T cell response in a human patient, comprising administering a pharmaceutical composition described herein. The patient may be afflicted with lung cancer, in which case the methods provide treatment for the disease, or patient considered at risk for such a disease may be treated prophylactically.

[0030] Within further aspects, the present invention provides methods for inhibiting the development of a cancer in a patient, comprising administering to a patient a pharmaceutical composition as recited above. The patient may be afflicted with lung cancer, in which case the methods provide treatment for the disease, or patient considered at risk for such a disease may be treated prophylactically.

[0031] The present invention further provides, within other aspects, methods for removing tumor cells from a biological sample, comprising contacting a biological sample with T cells that specifically react with a polypeptide of the present invention, wherein the step of contacting is performed under conditions and for a time sufficient to permit the removal of cells expressing the protein from the sample.

[0032] Within related aspects, methods are provided for inhibiting the development of a cancer in a patient, comprising administering to a patient a biological sample treated as described above.

[0033] Methods are further provided, within other aspects, for stimulating and/or expanding T cells specific for a polypeptide of the present invention, comprising contacting T cells with one or more of: (i) a polypeptide as described above; (ii) a polynucleotide encoding such a polypeptide; and/or (iii) an antigen presenting cell that expresses such a polypeptide; under conditions and for a time sufficient to permit the stimulation and/or expansion of T cells. Isolated T cell populations comprising T cells prepared as described above are also provided.

[0034] Within further aspects, the present invention provides methods for inhibiting the development of a cancer in a patient, comprising administering to a patient an effective amount of a T cell population as described above.

[0035] The present invention further provides methods for inhibiting the development of a cancer in a patient, comprising the steps of: (a) incubating CD4⁺ and/or CD8⁺ T cells isolated from a patient with one or more of: (i) a polypeptide comprising at least an immunogenic portion of polypeptide disclosed herein; (ii) a polynucleotide encoding such a polypeptide; and (iii) an antigen-presenting cell that expressed such a polypeptide; and (b) administering to the patient an effective amount of the proliferated T cells, and thereby inhibiting the development of a cancer in the patient. Proliferated cells may, but need not, be cloned prior to administration to the patient.

[0036] Within further aspects, the present invention provides methods for determining the presence or absence of a cancer, preferably a lung cancer, in a patient comprising: (a) contacting a biological sample obtained from a patient with a binding agent that binds to a polypeptide as recited above; (b) detecting in the sample an amount of polypeptide that binds to the binding agent; and (c) comparing the amount of polypeptide with a predetermined cut-off value, and therefrom determining the presence or absence of a cancer in the patient. Within preferred embodiments, the binding agent is an antibody, more preferably a monoclonal antibody.

[0037] The present invention also provides, within other aspects, methods for monitoring the progression of a cancer in a patient. Such methods comprise the steps of: (a) contacting a biological sample obtained from a patient at a first point in time with a binding agent that binds to a polypeptide as recited above; (b) detecting in the sample an amount of polypeptide that binds to the binding agent; (c) repeating steps (a) and (b) using a biological sample obtained from the patient at a subsequent point in time; and (d) comparing the amount of polypeptide detected in step (c) with the amount detected in step (b) and therefrom monitoring the progression of the cancer in the patient.

[0038] The present invention further provides, within other aspects, methods for determining the presence or absence of a cancer in a patient, comprising the steps of: (a) contacting a biological sample obtained from a patient with an oligonucleotide that hybridizes to a polynucleotide that encodes a polypeptide of the present invention; (b) detecting in the sample a level of a polynucleotide, preferably mRNA, that hybridizes to the oligonucleotide; and (c) comparing the level of polynucleotide that hybridizes to the oligonucleotide with a predetermined cut-off value, and therefrom determining the presence or absence of a cancer in the patient. Within certain embodiments, the amount of mRNA is detected via polymerase chain reaction using, for example, at least one oligonucleotide primer that hybridizes to a polynucleotide encoding a polypeptide as recited above, or a complement of such a polynucleotide. Within other embodiments, the amount of mRNA is detected using a hybridization technique, employing an oligonucleotide probe that hybridizes to a polynucleotide that encodes a polypeptide as recited above, or a complement of such a polynucleotide.

[0039] In related aspects, methods are provided for monitoring the progression of a cancer in a patient, comprising the steps of: (a) contacting a biological sample obtained from a patient with an oligonucleotide that hybridizes to a polynucleotide that encodes a polypeptide of the present invention; (b) detecting in the sample an amount of a polynucleotide that hybridizes to the oligonucleotide; (c) repeating steps (a) and (b) using a biological sample obtained from the patient at a subsequent point in time; and (d) comparing the amount of polynucleotide detected in step (c) with the amount detected in step (b) and therefrom monitoring the progression of the cancer in the patient.

[0040] Within further aspects, the present invention provides antibodies, such as monoclonal antibodies, that bind to a polypeptide as described above, as well as diagnostic kits comprising such antibodies. Diagnostic kits comprising one or more oligonucleotide probes or primers as described above are also provided.

[0041] These and other aspects of the present invention will become apparent upon reference to the following detailed description. All references disclosed herein are hereby incorporated by reference in their entirety as if each was incorporated individually.

[0042] Sequence Identifiers

[0043] SEQ ID NO:1 is the determined cDNA sequence for clone #19038, also referred to as L845P.

[0044] SEQ ID NO:2 is the determined cDNA sequence for clone #19036.

[0045] SEQ ID NO:3 is the determined cDNA sequence for clone #19034.

[0046] SEQ ID NO:4 is the determined cDNA sequence for clone #19033.

[0047] SEQ ID NO:5 is the determined cDNA sequence for clone #19032.

[0048] SEQ ID NO:6 is the determined cDNA sequence for clone #19030, also referred to as L559S.

[0049] SEQ ID NO:7 is the determined cDNA sequence for clone #19029.

[0050] SEQ ID NO:8 is the determined cDNA sequence for clone #19025.

[0051] SEQ ID NO:9 is the determined cDNA sequence for clone #19023.

[0052] SEQ ID NO:10 is the determined cDNA sequence for clone #18929.

[0053] SEQ ID NO:11 is the determined cDNA sequence for clone #19010.

[0054] SEQ ID NO:12 is the determined cDNA sequence for clone #19009.

[0055] SEQ ID NO:13 is the determined cDNA sequence for clones #19005, 19007, 19016 and 19017.

[0056] SEQ ID NO:14 is the determined cDNA sequence for clone #19004.

[0057] SEQ ID NO:15 is the determined cDNA sequence for clones #19002 and 18965.

[0058] SEQ ID NO:16 is the determined cDNA sequence for clone #18998.

[0059] SEQ ID NO:17 is the determined cDNA sequence for clone #18997.

[0060] SEQ ID NO:18 is the determined cDNA sequence for clone #18996.

[0061] SEQ ID NO:19 is the determined cDNA sequence for clone #18995.

[0062] SEQ ID NO:20 is the determined cDNA sequence for clone #18994, also known as L846P.

[0063] SEQ ID NO:21 is the determined cDNA sequence for clone #18992.

[0064] SEQ ID NO:22 is the determined cDNA sequence for clone #18991.

[0065] SEQ ID NO:23 is the determined cDNA sequence for clone #18990, also referred to as clone #20111.

[0066] SEQ ID NO:24 is the determined cDNA sequence for clone #18987.

[0067] SEQ ID NO:25 is the determined cDNA sequence for clone #18985, also referred as L839P.

[0068] SEQ ID NO:26 is the determined cDNA sequence for clone #18984, also referred to as L847P.

[0069] SEQ ID NO:27 is the determined cDNA sequence for clone #18983.

[0070] SEQ ID NO:28 is the determined cDNA sequence for clones #18976 and 18980.

[0071] SEQ ID NO:29 is the determined cDNA sequence for clone #18975.

[0072] SEQ ID NO:30 is the determined cDNA sequence for clone #18974.

[0073] SEQ ID NO:31 is the determined cDNA sequence for clone #18973.

[0074] SEQ ID NO:32 is the determined cDNA sequence for clone #18972.

[0075] SEQ ID NO:33 is the determined cDNA sequence for clone #18971, also referred to as L801P.

[0076] SEQ ID NO:34 is the determined cDNA sequence for clone #18970.

[0077] SEQ ID NO:35 is the determined cDNA sequence for clone #18966.

[0078] SEQ ID NO:36 is the determined cDNA sequence for clones #18964, 18968 and 19039.

[0079] SEQ ID NO:37 is the determined cDNA sequence for clone #18960.

[0080] SEQ ID NO:38 is the determined cDNA sequence for clone #18959.

[0081] SEQ ID NO:39 is the determined cDNA sequence for clones #18958 and 18982.

[0082] SEQ ID NO:40 is the determined cDNA sequence for clones #18956 and 19015.

[0083] SEQ ID NO:41 is the determined cDNA sequence for clone #18954, also referred to L848P.

[0084] SEQ ID NO:42 is the determined cDNA sequence for clone #18951.

[0085] SEQ ID NO:43 is the determined cDNA sequence for clone #18950.

[0086] SEQ ID NO:44 is the determined cDNA sequence for clones #18949 and 19024, also referred to as L844P.

[0087] SEQ ID NO:45 is the determined cDNA sequence for clone #18948.

[0088] SEQ ID NO:46 is the determined cDNA sequence for clone #18947, also referred to as L840P.

[0089] SEQ ID NO:47 is the determined cDNA sequence for clones #18946, 18953, 18969 and 19027.

[0090] SEQ ID NO:48 is the determined cDNA sequence for clone #18942.

[0091] SEQ ID NO:49 is the determined cDNA sequence for clone #18940, 18962, 18963, 19006, 19008, 19000, and 19031.

[0092] SEQ ID NO:50 is the determined cDNA sequence for clone #18939.

[0093] SEQ ID NO:51 is the determined cDNA sequence for clones #18938 and 18952.

[0094] SEQ ID NO:52 is the determined cDNA sequence for clone #18938.

[0095] SEQ ID NO:53 is the determined cDNA sequence for clone #18937.

[0096] SEQ ID NO:54 is the determined cDNA sequence for clones #18934, 18935, 18993 and 19022, also referred to as L548S.

[0097] SEQ ID NO:55 is the determined cDNA sequence for clone #18932.

[0098] SEQ ID NO:56 is the determined cDNA sequence for clones #18931 and 18936.

[0099] SEQ ID NO:57 is the determined cDNA sequence for clone #18930.

[0100] SEQ ID NO:58 is the determined cDNA sequence for clone #19014 (this sequence has homology to clone L773P, which is also described in co-pending U.S. application Ser. No. 09/285,479, filed Apr. 2, 1999).

[0101] SEQ ID NO:59 is the determined cDNA sequence for clone 19127.

[0102] SEQ ID NO:60 is the determined cDNA sequence for clones #19057 and 19064.

[0103] SEQ ID NO:61 is the determined cDNA sequence for clone #19122.

[0104] SEQ ID NO:62 is the determined cDNA sequence for clones #19120 and 18121.

[0105] SEQ ID NO:63 is the determined cDNA sequence for clone #19118.

[0106] SEQ ID NO:64 is the determined cDNA sequence for clone #19117.

[0107] SEQ ID NO:65 is the determined cDNA sequence for clone #19116.

[0108] SEQ ID NO:66 is the determined cDNA sequence for clone #19114.

[0109] SEQ ID NO:67 is the determined cDNA sequence for clone #19112, also known as L561S.

[0110] SEQ ID NO:68 is the determined cDNA sequence for clone #19110.

[0111] SEQ ID NO:69 is the determined cDNA sequence for clone #19107, also referred to as L552S.

[0112] SEQ ID NO:70 is the determined cDNA sequence for clone #19106, also referred to as L547S.

[0113] SEQ ID NO:71 is the determined cDNA sequence for clones #19105 and 19111.

[0114] SEQ ID NO:72 is the determined cDNA sequence for clone #19099.

[0115] SEQ ID NO:73 is the determined cDNA sequence for clones #19095, 19104 and 19125, also referred to as L549S.

[0116] SEQ ID NO:74 is the determined cDNA sequence for clone #19094.

[0117] SEQ ID NO:75 is the determined cDNA sequence for clones #19089 and 19101.

[0118] SEQ ID NO:76 is the determined cDNA sequence for clone #19088.

[0119] SEQ ID NO:77 is the determined cDNA sequence for clones #19087, 19092, 19096, 19100 and 19119.

[0120] SEQ ID NO:78 is the determined cDNA sequence for clone #19086.

[0121] SEQ ID NO:79 is the determined cDNA sequence for clone #19085, also referred to as L550S.

[0122] SEQ ID NO:80 is the determined cDNA sequence for clone #19084, also referred to as clone #19079.

[0123] SEQ ID NO:81 is the determined cDNA sequence for clone #19082.

[0124] SEQ ID NO:82 is the determined cDNA sequence for clone #19080.

[0125] SEQ ID NO:83 is the determined cDNA sequence for clone #19077.

[0126] SEQ ID NO:84 is the determined cDNA sequence for clone #19076, also referred to as L551S.

[0127] SEQ ID NO:85 is the determined cDNA sequence for clone #19074, also referred to as clone #20102.

[0128] SEQ ID NO:86 is the determined cDNA sequence for clone #19073, also referred to as L560S.

[0129] SEQ ID NO:87 is the determined cDNA sequence for clones #19072 and 19115.

[0130] SEQ ID NO:88 is the determined cDNA sequence for clone #19071.

[0131] SEQ ID NO:89 is the determined cDNA sequence for clone #19070.

[0132] SEQ ID NO:90 is the determined cDNA sequence for clone #19069.

[0133] SEQ ID NO:91 is the determined cDNA sequence for clone #19068, also referred to L563S.

[0134] SEQ ID NO:92 is the determined cDNA sequence for clone #19066.

[0135] SEQ ID NO:93 is the determined cDNA sequence for clone #19065.

[0136] SEQ ID NO:94 is the determined cDNA sequence for clone #19063.

[0137] SEQ ID NO:95 is the determined cDNA sequence for clones #19061, 19081, 19108 and 19109.

[0138] SEQ ID NO:96 is the determined cDNA sequence for clones #19060, 19067 and 19083, also referred to as L548S.

[0139] SEQ ID NO:97 is the determined cDNA sequence for clones #19059 and 19062.

[0140] SEQ ID NO:98 is the determined cDNA sequence for clone #19058.

[0141] SEQ ID NO:99 is the determined cDNA sequence for clone #19124.

[0142] SEQ ID NO:1100 is the determined cDNA sequence for clone #18929.

[0143] SEQ ID NO:1 μl is the determined cDNA sequence for clone #18422.

[0144] SEQ ID NO:102 is the determined cDNA sequence for clone #18425.

[0145] SEQ ID NO:103 is the determined cDNA sequence for clone #18431.

[0146] SEQ ID NO:104 is the determined cDNA sequence for clone #8433.

[0147] SEQ ID NO:105 is the determined cDNA sequence for clone #18444.

[0148] SEQ ID NO:106 is the determined cDNA sequence for clone #18449.

[0149] SEQ ID NO:107 is the determined cDNA sequence for clone #18451.

[0150] SEQ ID NO:108 is the determined cDNA sequence for clone #18452.

[0151] SEQ ID NO:109 is the determined cDNA sequence for clone #18455.

[0152] SEQ ID NO:110 is the determined cDNA sequence for clone #18457.

[0153] SEQ ID NO:11 is the determined cDNA sequence for clone #18466.

[0154] SEQ ID NO:112 is the determined cDNA sequence for clone #18468.

[0155] SEQ ID NO:113 is the determined cDNA sequence for clone #18471.

[0156] SEQ ID NO:114 is the determined cDNA sequence for clone #18475.

[0157] SEQ ID NO:115 is the determined cDNA sequence for clone #18476.

[0158] SEQ ID NO:116 is the determined cDNA sequence for clone #18477.

[0159] SEQ ID NO:117 is the determined cDNA sequence for clone #20631.

[0160] SEQ ID NO:118 is the determined cDNA sequence for clone #20634.

[0161] SEQ ID NO:119 is the determined cDNA sequence for clone #20635.

[0162] SEQ ID NO:120 is the determined cDNA sequence for clone #20637.

[0163] SEQ ID NO:121 is the determined cDNA sequence for clone #20638.

[0164] SEQ ID NO:122 is the determined cDNA sequence for clone #20643.

[0165] SEQ ID NO:123 is the determined cDNA sequence for clone #20652.

[0166] SEQ ID NO:124 is the determined cDNA sequence for clone #20653.

[0167] SEQ ID NO:125 is the determined cDNA sequence for clone #20657.

[0168] SEQ ID NO:126 is the determined cDNA sequence for clone #20658.

[0169] SEQ ID NO:127 is the determined cDNA sequence for clone #20660.

[0170] SEQ ID NO:128 is the determined cDNA sequence for clone #20661.

[0171] SEQ ID NO:129 is the determined cDNA sequence for clone #20663.

[0172] SEQ ID NO:130 is the determined cDNA sequence for clone #20665.

[0173] SEQ ID NO:131 is the determined cDNA sequence for clone #20670.

[0174] SEQ ID NO:132 is the determined cDNA sequence for clone #20671.

[0175] SEQ ID NO:133 is the determined cDNA sequence for clone #20672.

[0176] SEQ ID NO:134 is the determined cDNA sequence for clone #20675.

[0177] SEQ ID NO:135 is the determined cDNA sequence for clone #20679.

[0178] SEQ ID NO:136 is the determined cDNA sequence for clone #20681.

[0179] SEQ ID NO:137 is the determined cDNA sequence for clone #20682.

[0180] SEQ ID NO:138 is the determined cDNA sequence for clone #20684.

[0181] SEQ ID NO:139 is the determined cDNA sequence for clone #20685.

[0182] SEQ ID NO:140 is the determined cDNA sequence for clone #20689.

[0183] SEQ ID NO:141 is the determined cDNA sequence for clone #20699.

[0184] SEQ ID NO:142 is the determined cDNA sequence for clone #20701.

[0185] SEQ ID NO:143 is the determined cDNA sequence for clone #20702.

[0186] SEQ ID NO:144 is the determined cDNA sequence for clone #20708.

[0187] SEQ ID NO:145 is the determined cDNA sequence for clone #20715.

[0188] SEQ ID NO:146 is the determined cDNA sequence for clone #20716.

[0189] SEQ ID NO:147 is the determined cDNA sequence for clone #20719.

[0190] SEQ ID NO:148 is the determined cDNA sequence for clone #19129.

[0191] SEQ ID NO:149 is the determined cDNA sequence for clone #19131.1.

[0192] SEQ ID NO:150 is the determined cDNA sequence for clone #19132.2.

[0193] SEQ ID NO:151 is the determined cDNA sequence for clone #19133.

[0194] SEQ ID NO:152 is the determined cDNA sequence for clone #19134.2.

[0195] SEQ ID NO:153 is the determined cDNA sequence for clone #19135.2.

[0196] SEQ ID NO:154 is the determined cDNA sequence for clone #19137.

[0197] SEQ ID NO:155 is a first determined cDNA sequence for clone #19138.1.

[0198] SEQ ID NO:156 is a second determined cDNA sequence for clone #19138.2.

[0199] SEQ ID NO:157 is the determined cDNA sequence for clone #19139.

[0200] SEQ ID NO:158 is a first determined cDNA sequence for clone #19140.1.

[0201] SEQ ID NO:159 is a second determined cDNA sequence for clone #19140.2.

[0202] SEQ ID NO:160 is the determined cDNA sequence for clone #19141.

[0203] SEQ ID NO:161 is the determined cDNA sequence for clone #19143.

[0204] SEQ ID NO:162 is the determined cDNA sequence for clone #19144.

[0205] SEQ ID NO:163 is a first determined cDNA sequence for clone #19145.1.

[0206] SEQ ID NO:164 is a second determined cDNA sequence for clone #19145.2.

[0207] SEQ ID NO:165 is the determined cDNA sequence for clone #19146.

[0208] SEQ ID NO:166 is the determined cDNA sequence for clone #19149.1.

[0209] SEQ ID NO:167 is the determined cDNA sequence for clone #19152.

[0210] SEQ ID NO:168 is a first determined cDNA sequence for clone #19153.1.

[0211] SEQ ID NO:169 is a second determined cDNA sequence for clone #19153.2.

[0212] SEQ ID NO:170 is the determined cDNA sequence for clone #19155.

[0213] SEQ ID NO:171 is the determined cDNA sequence for clone #19157.

[0214] SEQ ID NO:172 is the determined cDNA sequence for clone #19159.

[0215] SEQ ID NO:173 is the determined cDNA sequence for clone #19160.

[0216] SEQ ID NO:174 is a first determined cDNA sequence for clone #19161.1.

[0217] SEQ ID NO:175 is a second determined cDNA sequence for clone #19161.2.

[0218] SEQ ID NO:176 is the determined cDNA sequence for clone #19162.1.

[0219] SEQ ID NO:177 is the determined cDNA sequence for clone #19166.

[0220] SEQ ID NO:178 is the determined cDNA sequence for clone #19169.

[0221] SEQ ID NO:179 is the determined cDNA sequence for clone #19171.

[0222] SEQ ID NO:180 is a first determined cDNA sequence for clone #19173.1.

[0223] SEQ ID NO:181 is a second determined cDNA sequence for clone #19173.2.

[0224] SEQ ID NO:182 is the determined cDNA sequence for clone #19174.1.

[0225] SEQ ID NO:183 is the determined cDNA sequence for clone #19175.

[0226] SEQ ID NO:184 is the determined cDNA sequence for clone #19177.

[0227] SEQ ID NO:185 is the determined cDNA sequence for clone #19178.

[0228] SEQ ID NO:186 is the determined cDNA sequence for clone #19179.1.

[0229] SEQ ID NO:187 is the determined cDNA sequence for clone #19179.2.

[0230] SEQ ID NO:188 is the determined cDNA sequence for clone #19180.

[0231] SEQ ID NO:189 is a first determined cDNA sequence for clone #19182.1.

[0232] SEQ ID NO:190 is a second determined cDNA sequence for clone #19182.2.

[0233] SEQ ID NO:191 is the determined cDNA sequence for clone #19183.1.

[0234] SEQ ID NO:192 is the determined cDNA sequence for clone #19185.1.

[0235] SEQ ID NO:193 is the determined cDNA sequence for clone #19187.

[0236] SEQ ID NO:194 is the determined cDNA sequence for clone #19188.

[0237] SEQ ID NO:195 is the determined cDNA sequence for clone #19190.

[0238] SEQ ID NO:196 is the determined cDNA sequence for clone #19191.

[0239] SEQ ID NO:197 is the determined cDNA sequence for clone #19192.

[0240] SEQ ID NO:198 is the determined cDNA sequence for clone #19193.

[0241] SEQ ID NO:199 is a first determined cDNA sequence for clone #19194.1.

[0242] SEQ ID NO:200 is a second determined cDNA sequence for clone #19194.2.

[0243] SEQ ID NO:201 is the determined cDNA sequence for clone #19197.

[0244] SEQ ID NO:202 is a first determined cDNA sequence for clone #19200.1.

[0245] SEQ ID NO:203 is a second determined cDNA sequence for clone #19200.2.

[0246] SEQ ID NO:204 is the determined cDNA sequence for clone #19202.

[0247] SEQ ID NO:205 is a first determined cDNA sequence for clone #19204.1.

[0248] SEQ ID NO:206 is a second determined cDNA sequence for clone #19204.2.

[0249] SEQ ID NO:207 is the determined cDNA sequence for clone #19205.

[0250] SEQ ID NO:208 is a first determined cDNA sequence for clone #19206.1.

[0251] SEQ ID NO:209 is a second determined cDNA sequence for clone #19206.2.

[0252] SEQ ID NO:210 is the determined cDNA sequence for clone #19207.

[0253] SEQ ID NO:211 is the determined cDNA sequence for clone #19208.

[0254] SEQ ID NO:212 is a first determined cDNA sequence for clone #19211.1.

[0255] SEQ ID NO:213 is a second determined cDNA sequence for clone #19211.2.

[0256] SEQ ID NO:214 is a first determined cDNA sequence for clone #19214.1.

[0257] SEQ ID NO:215 is a second determined cDNA sequence for clone #19214.2.

[0258] SEQ ID NO:216 is the determined cDNA sequence for clone #19215.

[0259] SEQ ID NO:217 is a first determined cDNA sequence for clone #19217.2.

[0260] SEQ ID NO:218 is a second determined cDNA sequence for clone #19217.2.

[0261] SEQ ID NO:219 is a first determined cDNA sequence for clone #19218.1.

[0262] SEQ ID NO:220 is a second determined cDNA sequence for clone #19218.2.

[0263] SEQ ID NO:221 is a first determined cDNA sequence for clone #19220.1.

[0264] SEQ ID NO:222 is a second determined cDNA sequence for clone #19220.2.

[0265] SEQ ID NO:223 is the determined cDNA sequence for clone #22015.

[0266] SEQ ID NO:224 is the determined cDNA sequence for clone #22017.

[0267] SEQ ID NO:225 is the determined cDNA sequence for clone #22019.

[0268] SEQ ID NO:226 is the determined cDNA sequence for clone #22020.

[0269] SEQ ID NO:227 is the determined cDNA sequence for clone #22023.

[0270] SEQ ID NO:228 is the determined cDNA sequence for clone #22026.

[0271] SEQ ID NO:229 is the determined cDNA sequence for clone #22027.

[0272] SEQ ID NO:230 is the determined cDNA sequence for clone #22028.

[0273] SEQ ID NO:231 is the determined cDNA sequence for clone #22032.

[0274] SEQ ID NO:232 is the determined cDNA sequence for clone #22037.

[0275] SEQ ID NO:233 is the determined cDNA sequence for clone #22045.

[0276] SEQ ID NO:234 is the determined cDNA sequence for clone #22048.

[0277] SEQ ID NO:235 is the determined cDNA sequence for clone #22050.

[0278] SEQ ID NO:236 is the determined cDNA sequence for clone #22052.

[0279] SEQ ID NO:237 is the determined cDNA sequence for clone #22053.

[0280] SEQ ID NO:238 is the determined cDNA sequence for clone #22057.

[0281] SEQ ID NO:239 is the determined cDNA sequence for clone #22066.

[0282] SEQ ID NO:240 is the determined cDNA sequence for clone #22077.

[0283] SEQ ID NO:241 is the determined cDNA sequence for clone #22085.

[0284] SEQ ID NO:242 is the determined cDNA sequence for clone #22105.

[0285] SEQ ID NO:243 is the determined cDNA sequence for clone #22108.

[0286] SEQ ID NO:244 is the determined cDNA sequence for clone #22109.

[0287] SEQ ID NO:245 is the determined cDNA sequence for clone #24842.

[0288] SEQ ID NO:246 is the determined cDNA sequence for clone #24843.

[0289] SEQ ID NO:247 is the determined cDNA sequence for clone #24845.

[0290] SEQ ID NO:248 is the determined cDNA sequence for clone #24851.

[0291] SEQ ID NO:249 is the determined cDNA sequence for clone #24852.

[0292] SEQ ID NO:250 is the determined cDNA sequence for clone #24853.

[0293] SEQ ID NO:251 is the determined cDNA sequence for clone #24854.

[0294] SEQ ID NO:252 is the determined cDNA sequence for clone #24855.

[0295] SEQ ID NO:253 is the determined cDNA sequence for clone #24860.

[0296] SEQ ID NO:254 is the determined cDNA sequence for clone #24864.

[0297] SEQ ID NO:255 is the determined cDNA sequence for clone #24866.

[0298] SEQ ID NO:256 is the determined cDNA sequence for clone #24867.

[0299] SEQ ID NO:257 is the determined cDNA sequence for clone #24868.

[0300] SEQ ID NO:258 is the determined cDNA sequence for clone #24869.

[0301] SEQ ID NO:259 is the determined cDNA sequence for clone #24870.

[0302] SEQ ID NO:260 is the determined cDNA sequence for clone #24872.

[0303] SEQ ID NO:261 is the determined cDNA sequence for clone #24873.

[0304] SEQ ID NO:262 is the determined cDNA sequence for clone #24875.

[0305] SEQ ID NO:263 is the determined cDNA sequence for clone #24882.

[0306] SEQ ID NO:264 is the determined cDNA sequence for clone #24885.

[0307] SEQ ID NO:265 is the determined cDNA sequence for clone #24886.

[0308] SEQ ID NO:266 is the determined cDNA sequence for clone #24887.

[0309] SEQ ID NO:267 is the determined cDNA sequence for clone #24888.

[0310] SEQ ID NO:268 is the determined cDNA sequence for clone #24890.

[0311] SEQ ID NO:269 is the determined cDNA sequence for clone #24896.

[0312] SEQ ID NO:270 is the determined cDNA sequence for clone #24897.

[0313] SEQ ID NO:271 is the determined cDNA sequence for clone #24899.

[0314] SEQ ID NO:272 is the determined cDNA sequence for clone #24901.

[0315] SEQ ID NO:273 is the determined cDNA sequence for clone #24902.

[0316] SEQ ID NO:274 is the determined cDNA sequence for clone #24906.

[0317] SEQ ID NO:275 is the determined cDNA sequence for clone #24912.

[0318] SEQ ID NO:276 is the determined cDNA sequence for clone #24913.

[0319] SEQ ID NO:277 is the determined cDNA sequence for clone #24920.

[0320] SEQ ID NO:278 is the determined cDNA sequence for clone #24927.

[0321] SEQ ID NO:279 is the determined cDNA sequence for clone #24930.

[0322] SEQ ID NO:280 is the determined cDNA sequence for clone #26938.

[0323] SEQ ID NO:281 is the determined cDNA sequence for clone #26939.

[0324] SEQ ID NO:282 is the determined cDNA sequence for clone #26943.

[0325] SEQ ID NO:283 is the determined cDNA sequence for clone #26948.

[0326] SEQ ID NO:284 is the determined cDNA sequence for clone #26951.

[0327] SEQ ID NO:285 is the determined cDNA sequence for clone #26955.

[0328] SEQ ID NO:286 is the determined cDNA sequence for clone #26956.

[0329] SEQ ID NO:287 is the determined cDNA sequence for clone #26959.

[0330] SEQ ID NO:288 is the determined cDNA sequence for clone #26961.

[0331] SEQ ID NO:289 is the determined cDNA sequence for clone #26962.

[0332] SEQ ID NO:290 is the determined cDNA sequence for clone #26964.

[0333] SEQ ID NO:291 is the determined cDNA sequence for clone #26966.

[0334] SEQ ID NO:292 is the determined cDNA sequence for clone #26968.

[0335] SEQ ID NO:293 is the determined cDNA sequence for clone #26972.

[0336] SEQ ID NO:294 is the determined cDNA sequence for clone #26973.

[0337] SEQ ID NO:295 is the determined cDNA sequence for clone #26974.

[0338] SEQ ID NO:296 is the determined cDNA sequence for clone #26976.

[0339] SEQ ID NO:297 is the determined cDNA sequence for clone #26977.

[0340] SEQ ID NO:298 is the determined cDNA sequence for clone #26979.

[0341] SEQ ID NO:299 is the determined cDNA sequence for clone #26980.

[0342] SEQ ID NO:300 is the determined cDNA sequence for clone #26981.

[0343] SEQ ID NO:301 is the determined cDNA sequence for clone #26984.

[0344] SEQ ID NO:302 is the determined cDNA sequence for clone #26985.

[0345] SEQ ID NO:303 is the determined cDNA sequence for clone #26986.

[0346] SEQ ID NO:304 is the determined cDNA sequence for clone #26993.

[0347] SEQ ID NO:305 is the determined cDNA sequence for clone #26994.

[0348] SEQ ID NO:306 is the determined cDNA sequence for clone #26995.

[0349] SEQ ID NO:307 is the determined cDNA sequence for clone #27003.

[0350] SEQ ID NO:308 is the determined cDNA sequence for clone #27005.

[0351] SEQ ID NO:309 is the determined cDNA sequence for clone #27010.

[0352] SEQ ID NO:310 is the determined cDNA sequence for clone #27011.

[0353] SEQ ID NO:311 is the determined cDNA sequence for clone #27013.

[0354] SEQ ID NO:312 is the determined cDNA sequence for clone #27016

[0355] SEQ ID NO:313 is the determined cDNA sequence for clone #27017.

[0356] SEQ ID NO:314 is the determined cDNA sequence for clone #27019.

[0357] SEQ ID NO:315 is the determined cDNA sequence for clone #27028.

[0358] SEQ ID NO:316 is the full-length cDNA sequence for clone #19060.

[0359] SEQ ID NO:317 is the full-length cDNA sequence for clone #8964.

[0360] SEQ ID NO:318 is the full-length cDNA sequence for clone #18929.

[0361] SEQ ID NO:319 is the full-length cDNA sequence for clone #18991.

[0362] SEQ ID NO:320 is the full-length cDNA sequence for clone #18996.

[0363] SEQ ID NO:321 is the full-length cDNA sequence for clone #18966.

[0364] SEQ ID NO:322 is the full-length cDNA sequence for clone #18951.

[0365] SEQ ID NO:323 is the full-length cDNA sequence for clone #18973 (also known as L516S).

[0366] SEQ ID NO:324 is the amino acid sequence for clone #19060.

[0367] SEQ ID NO:325 is the amino acid sequence for clone #19063.

[0368] SEQ ID NO:326 is the amino acid sequence for clone #19077.

[0369] SEQ ID NO:327 is the amino acid sequence for clone #19110.

[0370] SEQ ID NO:328 is the amino acid sequence for clone #19122.

[0371] SEQ ID NO:329 is the amino acid sequence for clone #19118.

[0372] SEQ ID NO:330 is the amino acid sequence for clone #19080.

[0373] SEQ ID NO:331 is the amino acid sequence for clone #19127.

[0374] SEQ ID NO:332 is the amino acid sequence for clone #19117.

[0375] SEQ ID NO:333 is the amino acid sequence for clone #19095, also referred to L549S.

[0376] SEQ ID NO:334 is the amino acid sequence for clone #18964.

[0377] SEQ ID NO:335 is the amino acid sequence for clone #18929.

[0378] SEQ ID NO:336 is the amino acid sequence for clone #18991.

[0379] SEQ ID NO:337 is the amino acid sequence for clone #18996.

[0380] SEQ ID NO:338 is the amino acid sequence for clone #18966.

[0381] SEQ ID NO:339 is the amino acid sequence for clone #18951.

[0382] SEQ ID NO:340 is the amino acid sequence for clone #18973.

[0383] SEQ ID NO:341 is the determined cDNA sequence for clone 26461.

[0384] SEQ ID NO:342 is the determined cDNA sequence for clone 26462.

[0385] SEQ ID NO:343 is the determined cDNA sequence for clone 26463.

[0386] SEQ ID NO:344 is the determined cDNA sequence for clone 26464.

[0387] SEQ ID NO:345 is the determined cDNA sequence for clone 26465.

[0388] SEQ ID NO:346 is the determined cDNA sequence for clone 26466.

[0389] SEQ ID NO:347 is the determined cDNA sequence for clone 26467.

[0390] SEQ ID NO:348 is the determined cDNA sequence for clone 26468.

[0391] SEQ ID NO:349 is the determined cDNA sequence for clone 26469.

[0392] SEQ ID NO:350 is the determined cDNA sequence for clone 26470.

[0393] SEQ ID NO:351 is the determined cDNA sequence for clone 26471.

[0394] SEQ ID NO:352 is the determined cDNA sequence for clone 26472.

[0395] SEQ ID NO:353 is the determined cDNA sequence for clone 26474.

[0396] SEQ ID NO:354 is the determined cDNA sequence for clone 26475.

[0397] SEQ ID NO:355 is the determined cDNA sequence for clone 26476.

[0398] SEQ ID NO:356 is the determined cDNA sequence for clone 26477.

[0399] SEQ ID NO:357 is the determined cDNA sequence for clone 26478.

[0400] SEQ ID NO:358 is the determined cDNA sequence for clone 26479.

[0401] SEQ ID NO:359 is the determined cDNA sequence for clone 26480.

[0402] SEQ ID NO:360 is the determined cDNA sequence for clone 26481.

[0403] SEQ ID NO:361 is the determined cDNA sequence for clone 26482

[0404] SEQ ID NO:362 is the determined cDNA sequence for clone 26483.

[0405] SEQ ID NO:363 is the determined cDNA sequence for clone 26484.

[0406] SEQ ID NO:364 is the determined cDNA sequence for clone 26485.

[0407] SEQ ID NO:365 is the determined cDNA sequence for clone 26486.

[0408] SEQ ID NO:366 is the determined cDNA sequence for clone 26487.

[0409] SEQ ID NO:367 is the determined cDNA sequence for clone 26488.

[0410] SEQ ID NO:368 is the determined cDNA sequence for clone 26489.

[0411] SEQ ID NO:369 is the determined cDNA sequence for clone 26490.

[0412] SEQ ID NO:370 is the determined cDNA sequence for clone 26491.

[0413] SEQ ID NO:371 is the determined cDNA sequence for clone 26492.

[0414] SEQ ID NO:372 is the determined cDNA sequence for clone 26493.

[0415] SEQ ID NO:373 is the determined cDNA sequence for clone 26494.

[0416] SEQ ID NO:374 is the determined cDNA sequence for clone 26495.

[0417] SEQ ID NO:375 is the determined cDNA sequence for clone 26496.

[0418] SEQ ID NO:376 is the determined cDNA sequence for clone 26497.

[0419] SEQ ID NO:377 is the determined cDNA sequence for clone 26498.

[0420] SEQ ID NO:378 is the determined cDNA sequence for clone 26499.

[0421] SEQ ID NO:379 is the determined cDNA sequence for clone 26500.

[0422] SEQ ID NO:380 is the determined cDNA sequence for clone 26501.

[0423] SEQ ID NO:381 is the determined cDNA sequence for clone 26502.

[0424] SEQ ID NO:382 is the determined cDNA sequence for clone 26503.

[0425] SEQ ID NO:383 is the determined cDNA sequence for clone 26504.

[0426] SEQ ID NO:384 is the determined cDNA sequence for clone 26505.

[0427] SEQ ID NO:385 is the determined cDNA sequence for clone 26506.

[0428] SEQ ID NO:386 is the determined cDNA sequence for clone 26507.

[0429] SEQ ID NO:387 is the determined cDNA sequence for clone 26508.

[0430] SEQ ID NO:388 is the determined cDNA sequence for clone 26509.

[0431] SEQ ID NO:389 is the determined cDNA sequence for clone 26511.

[0432] SEQ ID NO:390 is the determined cDNA sequence for clone 26513.

[0433] SEQ ID NO:391 is the determined cDNA sequence for clone 26514.

[0434] SEQ ID NO:392 is the determined cDNA sequence for clone 26515.

[0435] SEQ ID NO:393 is the determined cDNA sequence for clone 26516.

[0436] SEQ ID NO:394 is the determined cDNA sequence for clone 26517.

[0437] SEQ ID NO:395 is the determined cDNA sequence for clone 26518.

[0438] SEQ ID NO:396 is the determined cDNA sequence for clone 26519.

[0439] SEQ ID NO:397 is the determined cDNA sequence for clone 26520.

[0440] SEQ ID NO:398 is the determined cDNA sequence for clone 26521.

[0441] SEQ ID NO:399 is the determined cDNA sequence for clone 26522.

[0442] SEQ ID NO:400 is the determined cDNA sequence for clone 26523.

[0443] SEQ ID NO:401 is the determined cDNA sequence for clone 26524.

[0444] SEQ ID NO:402 is the determined cDNA sequence for clone 26526.

[0445] SEQ ID NO:403 is the determined cDNA sequence for clone 26527.

[0446] SEQ ID NO:404 is the determined cDNA sequence for clone 26528.

[0447] SEQ ID NO:405 is the determined cDNA sequence for clone 26529.

[0448] SEQ ID NO:406 is the determined cDNA sequence for clone 26530.

[0449] SEQ ID NO:407 is the determined cDNA sequence for clone 26532.

[0450] SEQ ID NO:408 is the determined cDNA sequence for clone 26533.

[0451] SEQ ID NO:409 is the determined cDNA sequence for clone 26534.

[0452] SEQ ID NO:410 is the determined cDNA sequence for clone 26535.

[0453] SEQ ID NO:41 is the determined cDNA sequence for clone 26536.

[0454] SEQ ID NO:412 is the determined cDNA sequence for clone 26537.

[0455] SEQ ID NO:413 is the determined cDNA sequence for clone 26538.

[0456] SEQ ID NO:414 is the determined cDNA sequence for clone 26540.

[0457] SEQ ID NO:415 is the determined cDNA sequence for clone 26541.

[0458] SEQ ID NO:416 is the determined cDNA sequence for clone 26542.

[0459] SEQ ID NO:417 is the determined cDNA sequence for clone 26543.

[0460] SEQ ID NO:418 is the determined cDNA sequence for clone 26544.

[0461] SEQ ID NO:419 is the determined cDNA sequence for clone 26546.

[0462] SEQ ID NO:420 is the determined cDNA sequence for clone 26547.

[0463] SEQ ID NO:421 is the determined cDNA sequence for clone 26548.

[0464] SEQ ID NO:422 is the determined cDNA sequence for clone 26549.

[0465] SEQ ID NO:423 is the determined cDNA sequence for clone 26550.

[0466] SEQ ID NO:424 is the determined cDNA sequence for clone 26551.

[0467] SEQ ID NO:425 is the determined cDNA sequence for clone 26552.

[0468] SEQ ID NO:426 is the determined cDNA sequence for clone 26553.

[0469] SEQ ID NO:427 is the determined cDNA sequence for clone 26554.

[0470] SEQ ID NO:428 is the determined cDNA sequence for clone 26556.

[0471] SEQ ID NO:429 is the determined cDNA sequence for clone 26557.

[0472] SEQ ID NO:430 is the determined cDNA sequence for clone 27631.

[0473] SEQ ID NO:431 is the determined cDNA sequence for clone 27632.

[0474] SEQ ID NO:432 is the determined cDNA sequence for clone 27633.

[0475] SEQ ID NO:433 is the determined cDNA sequence for clone 27635.

[0476] SEQ ID NO:434 is the determined cDNA sequence for clone 27636.

[0477] SEQ ID NO:435 is the determined cDNA sequence for clone 27637.

[0478] SEQ ID NO:436 is the determined cDNA sequence for clone 27638.

[0479] SEQ ID NO:437 is the determined cDNA sequence for clone 27639.

[0480] SEQ ID NO:438 is the determined cDNA sequence for clone 27640.

[0481] SEQ ID NO:439 is the determined cDNA sequence for clone 27641.

[0482] SEQ ID NO:440 is the determined cDNA sequence for clone 27642.

[0483] SEQ ID NO:441 is the determined cDNA sequence for clone 27644.

[0484] SEQ ID NO:442 is the determined cDNA sequence for clone 27646.

[0485] SEQ ID NO:443 is the determined cDNA sequence for clone 27647.

[0486] SEQ ID NO:444 is the determined cDNA sequence for clone 27649.

[0487] SEQ ID NO:445 is the determined cDNA sequence for clone 27650.

[0488] SEQ ID NO:446 is the determined cDNA sequence for clone 27651.

[0489] SEQ ID NO:447 is the determined cDNA sequence for clone 27652.

[0490] SEQ ID NO:448 is the determined cDNA sequence for clone 27654.

[0491] SEQ ID NO:449 is the determined cDNA sequence for clone 27655.

[0492] SEQ ID NO:450 is the determined cDNA sequence for clone 27657.

[0493] SEQ ID NO:451 is the determined cDNA sequence for clone 27659.

[0494] SEQ ID NO:452 is the determined cDNA sequence for clone 27665.

[0495] SEQ ID NO:453 is the determined cDNA sequence for clone 27666.

[0496] SEQ ID NO:454 is the determined cDNA sequence for clone 27668.

[0497] SEQ ID NO:455 is the determined=DNA sequence for clone 27670.

[0498] SEQ ID NO:456 is the determined cDNA sequence for clone 27671.

[0499] SEQ ID NO:457 is the determined cDNA sequence for clone 27672.

[0500] SEQ ID NO:458 is the determined cDNA sequence for clone 27674.

[0501] SEQ ID NO:459 is the determined cDNA sequence for clone 27677.

[0502] SEQ ID NO:460 is the determined cDNA sequence for clone 27681.

[0503] SEQ ID NO:461 is the determined cDNA sequence for clone 27682.

[0504] SEQ ID NO:462 is the determined cDNA sequence for clone 27683.

[0505] SEQ ID NO:463 is the determined cDNA sequence for clone 27686.

[0506] SEQ ID NO:464 is the determined cDNA sequence for clone 27688.

[0507] SEQ ID NO:465 is the determined cDNA sequence for clone 27689.

[0508] SEQ ID NO:466 is the determined cDNA sequence for clone 27690.

[0509] SEQ ID NO:467 is the determined cDNA sequence for clone 27693.

[0510] SEQ ID NO:468 is the determined cDNA sequence for clone 27699.

[0511] SEQ ID NO:469 is the determined cDNA sequence for clone 27700.

[0512] SEQ ID NO:470 is the determined cDNA sequence for clone 27702.

[0513] SEQ ID NO:471 is the determined cDNA sequence for clone 27705.

[0514] SEQ ID NO:472 is the determined cDNA sequence for clone 27706.

[0515] SEQ ID NO:473 is the determined cDNA sequence for clone 27707.

[0516] SEQ ID NO:474 is the determined cDNA sequence for clone 27708.

[0517] SEQ ID NO:475 is the determined cDNA sequence for clone 27709.

[0518] SEQ ID NO:476 is the determined cDNA sequence for clone 27710.

[0519] SEQ ID NO:477 is the determined cDNA sequence for clone 27711.

[0520] SEQ ID NO:478 is the determined cDNA sequence for clone 27712.

[0521] SEQ ID NO:479 is the determined cDNA sequence for clone 27713.

[0522] SEQ ID NO:480 is the determined cDNA sequence for clone 27714.

[0523] SEQ ID NO:481 is the determined cDNA sequence for clone 27715.

[0524] SEQ ID NO:482 is the determined cDNA sequence for clone 27716.

[0525] SEQ ID NO:483 is the determined cDNA sequence for clone 27717.

[0526] SEQ ID NO:484 is the determined cDNA sequence for clone 27718.

[0527] SEQ ID NO:485 is the determined cDNA sequence for clone 27719.

[0528] SEQ ID NO:486 is the determined cDNA sequence for clone 27720.

[0529] SEQ ID NO:487 is the determined cDNA sequence for clone 27722.

[0530] SEQ ID NO:488 is the determined cDNA sequence for clone 27723.

[0531] SEQ ID NO:489 is the determined cDNA sequence for clone 27724.

[0532] SEQ ID NO:490 is the determined cDNA sequence for clone 27726.

[0533] SEQ ID NO:491 is the determined cDNA sequence for clone 25015.

[0534] SEQ ID NO:492 is the determined cDNA sequence for clone 25016.

[0535] SEQ ID NO:493 is the determined cDNA sequence for clone 25017.

[0536] SEQ ID NO:494 is the determined cDNA sequence for clone 25018

[0537] SEQ ID NO:495 is the determined cDNA sequence for clone 25030.

[0538] SEQ ID NO:496 is the determined cDNA sequence for clone 25033.

[0539] SEQ ID NO:497 is the determined cDNA sequence for clone 25034.

[0540] SEQ ID NO:498 is the determined cDNA sequence for clone 25035.

[0541] SEQ ID NO:499 is the determined cDNA sequence for clone 25036.

[0542] SEQ ID NO:500 is the determined cDNA sequence for clone 25037.

[0543] SEQ ID NO:501 is the determined cDNA sequence for clone 25038.

[0544] SEQ ID NO:502 is the determined cDNA sequence for clone 25039.

[0545] SEQ ID NO:503 is the determined cDNA sequence for clone 25040.

[0546] SEQ ID NO:504 is the determined cDNA sequence for clone 25042.

[0547] SEQ ID NO:505 is the determined cDNA sequence for clone 25043.

[0548] SEQ ID NO:506 is the determined cDNA sequence for clone 25044.

[0549] SEQ ID NO:507 is the determined cDNA sequence for clone 25045.

[0550] SEQ ID NO:508 is the determined cDNA sequence for clone 25047.

[0551] SEQ ID NO:509 is the determined cDNA sequence for clone 25048.

[0552] SEQ ID NO:510 is the determined cDNA sequence for clone 25049.

[0553] SEQ ID NO:511 is the determined cDNA sequence for clone 25185.

[0554] SEQ ID NO:512 is the determined cDNA sequence for clone 25186.

[0555] SEQ ID NO:513 is the determined cDNA sequence for clone 25187.

[0556] SEQ ID NO:514 is the determined cDNA sequence for clone 25188.

[0557] SEQ ID NO:515 is the determined cDNA sequence for clone 25189.

[0558] SEQ ID NO:516 is the determined cDNA sequence for clone 25190.

[0559] SEQ ID NO:517 is the determined cDNA sequence for clone 25193.

[0560] SEQ ID NO:518 is the determined cDNA sequence for clone 25194.

[0561] SEQ ID NO:519 is the determined cDNA sequence for clone 25196.

[0562] SEQ ID NO:520 is the determined cDNA sequence for clone 25198.

[0563] SEQ ID NO:521 is the determined cDNA sequence for clone 25199.

[0564] SEQ ID NO:522 is the determined cDNA sequence for clone 25200.

[0565] SEQ ID NO:523 is the determined cDNA sequence for clone 25202.

[0566] SEQ ID NO:524 is the determined cDNA sequence for clone 25364.

[0567] SEQ ID NO:525 is the determined cDNA sequence for clone 25366.

[0568] SEQ ID NO:526 is the determined cDNA sequence for clone 25367.

[0569] SEQ ID NO:527 is the determined cDNA sequence for clone 25368.

[0570] SEQ ID NO:528 is the determined cDNA sequence for clone 25369.

[0571] SEQ ID NO:529 is the determined cDNA sequence for clone 25370.

[0572] SEQ ID NO:530 is the determined cDNA sequence for clone 25371.

[0573] SEQ ID NO:531 is the determined cDNA sequence for clone 25372.

[0574] SEQ ID NO:532 is the determined cDNA sequence for clone 25373.

[0575] SEQ ID NO:533 is the determined cDNA sequence for clone 25374.

[0576] SEQ ID NO:534 is the determined cDNA sequence for clone 25376.

[0577] SEQ ID NO:535 is the determined cDNA sequence for clone 25377.

[0578] SEQ ID NO:536 is the determined cDNA sequence for clone 25378.

[0579] SEQ ID NO:537 is the determined cDNA sequence for clone 25379.

[0580] SEQ ID NO:538 is the determined cDNA sequence for clone 25380.

[0581] SEQ ID NO:539 is the determined cDNA sequence for clone 25381.

[0582] SEQ ID NO:540 is the determined cDNA sequence for clone 25382.

[0583] SEQ ID NO:541 is the determined cDNA sequence for clone 25383.

[0584] SEQ ID NO:542 is the determined cDNA sequence for clone 25385.

[0585] SEQ ID NO:543 is the determined cDNA sequence for clone 25386.

[0586] SEQ ID NO:544 is the determined cDNA sequence for clone 25387.

[0587] SEQ ID NO:545 is the determined cDNA sequence for clone 26013.

[0588] SEQ ID NO:546 is the determined cDNA sequence for clone 26014.

[0589] SEQ ID NO:547 is the determined cDNA sequence for clone 26016.

[0590] SEQ ID NO:548 is the determined cDNA sequence for clone 26017.

[0591] SEQ ID NO:549 is the determined cDNA sequence for clone 26018.

[0592] SEQ ID NO:550 is the determined cDNA sequence for clone 26019.

[0593] SEQ ID NO:551 is the determined cDNA sequence for clone 26020.

[0594] SEQ ID NO:552 is the determined cDNA sequence for clone 26021.

[0595] SEQ ID NO:553 is the determined cDNA sequence for clone 26022.

[0596] SEQ ID NO:554 is the determined cDNA sequence for clone 26027.

[0597] SEQ ID NO:555 is the determined cDNA sequence for clone 26197.

[0598] SEQ ID NO:556 is the determined cDNA sequence for clone 26199.

[0599] SEQ ID NO:557 is the determined cDNA sequence for clone 26201.

[0600] SEQ ID NO:558 is the determined cDNA sequence for clone 26202.

[0601] SEQ ID NO:559 is the determined cDNA sequence for clone 26203.

[0602] SEQ ID NO:560 is the determined cDNA sequence for clone 26204.

[0603] SEQ ID NO:561 is the determined cDNA sequence for clone 26205.

[0604] SEQ ID NO:562 is the determined cDNA sequence for clone 26206.

[0605] SEQ ID NO:563 is the determined cDNA sequence for clone 26208.

[0606] SEQ ID NO:564 is the determined cDNA sequence for clone 26211.

[0607] SEQ ID NO:565 is the determined cDNA sequence for clone 26212.

[0608] SEQ ID NO:566 is the determined cDNA sequence for clone 26213.

[0609] SEQ ID NO:567 is the determined cDNA sequence for clone 26214.

[0610] SEQ ID NO:568 is the determined cDNA sequence for clone 26215.

[0611] SEQ ID NO:569 is the determined cDNA sequence for clone 26216.

[0612] SEQ ID NO:570 is the determined cDNA sequence for clone 26217.

[0613] SEQ ID NO:571 is the determined cDNA sequence for clone 26218.

[0614] SEQ ID NO:572 is the determined cDNA sequence for clone 26219.

[0615] SEQ ID NO:573 is the determined cDNA sequence for clone 26220.

[0616] SEQ ID NO:574 is the determined cDNA sequence for clone 26221.

[0617] SEQ ID NO:575 is the determined cDNA sequence for clone 26224.

[0618] SEQ ID NO:576 is the determined cDNA sequence for clone 26225.

[0619] SEQ ID NO:577 is the determined cDNA sequence for clone 26226.

[0620] SEQ ID NO:578 is the determined cDNA sequence for clone 26227.

[0621] SEQ ID NO:579 is the determined cDNA sequence for clone 26228.

[0622] SEQ ID NO:580 is the determined cDNA sequence for clone 26230.

[0623] SEQ ID NO:581 is the determined cDNA sequence for clone 26231.

[0624] SEQ ID NO:582 is the determined cDNA sequence for clone 26234.

[0625] SEQ ID NO:583 is the determined cDNA sequence for clone 26236.

[0626] SEQ ID NO:584 is the determined cDNA sequence for clone 26237.

[0627] SEQ ID NO:585 is the determined cDNA sequence for clone 26239.

[0628] SEQ ID NO:586 is the determined cDNA sequence for clone 26240.

[0629] SEQ ID NO:587 is the determined cDNA sequence for clone 26241.

[0630] SEQ ID NO:588 is the determined cDNA sequence for clone 26242.

[0631] SEQ ID NO:589 is the determined cDNA sequence for clone 26246.

[0632] SEQ ID NO:590 is the determined cDNA sequence for clone 26247.

[0633] SEQ ID NO:591 is the determined cDNA sequence for clone 26248.

[0634] SEQ ID NO:592 is the determined cDNA sequence for clone 26249.

[0635] SEQ ID NO:593 is the determined cDNA sequence for clone 26250.

[0636] SEQ ID NO:594 is the determined cDNA sequence for clone 26251.

[0637] SEQ ID NO:595 is the determined cDNA sequence for clone 26252.

[0638] SEQ ID NO:596 is the determined cDNA sequence for clone 26253.

[0639] SEQ ID NO:597 is the determined cDNA sequence for clone 26254.

[0640] SEQ ID NO:598 is the determined cDNA sequence for clone 26255.

[0641] SEQ ID NO:599 is the determined cDNA sequence for clone 26256.

[0642] SEQ ID NO:600 is the determined cDNA sequence for clone 26257.

[0643] SEQ ID NO:601 is the determined cDNA sequence for clone 26259.

[0644] SEQ ID NO:602 is the determined cDNA sequence for clone 26260.

[0645] SEQ ID NO:603 is the determined cDNA sequence for clone 26261.

[0646] SEQ ID NO:604 is the determined cDNA sequence for clone 26262.

[0647] SEQ ID NO:605 is the determined cDNA sequence for clone 26263.

[0648] SEQ ID NO:606 is the determined cDNA sequence for clone 26264.

[0649] SEQ ID NO:607 is the determined cDNA sequence for clone 26265.

[0650] SEQ ID NO:608 is the determined cDNA sequence for clone 26266.

[0651] SEQ ID NO:609 is the determined cDNA sequence for clone 26268.

[0652] SEQ ID NO:610 is the determined cDNA sequence for clone 26269.

[0653] SEQ ID NO:611 is the determined cDNA sequence for clone 26271.

[0654] SEQ ID NO:612 is the determined cDNA sequence for clone 26273.

[0655] SEQ ID NO:613 is the determined cDNA sequence for clone 26810.

[0656] SEQ ID NO:614 is the determined cDNA sequence for clone 26811.

[0657] SEQ ID NO:615 is the determined cDNA sequence for clone 26812.1.

[0658] SEQ ID NO:616 is the determined cDNA sequence for clone 26812.2.

[0659] SEQ ID NO:617 is the determined cDNA sequence for clone 26813.

[0660] SEQ ID NO:618 is the determined cDNA sequence for clone 26814.

[0661] SEQ ID NO:619 is the determined cDNA sequence for clone 26815.

[0662] SEQ ID NO:620 is the determined cDNA sequence for clone 26816.

[0663] SEQ ID NO:621 is the determined cDNA sequence for clone 26818.

[0664] SEQ ID NO:622 is the determined cDNA sequence for clone 26819.

[0665] SEQ ID NO:623 is the determined cDNA sequence for clone 26820.

[0666] SEQ ID NO:624 is the determined cDNA sequence for clone 26821.

[0667] SEQ ID NO:625 is the determined cDNA sequence for clone 26822.

[0668] SEQ ID NO:626 is the determined cDNA sequence for clone 26824.

[0669] SEQ ID NO:627 is the determined cDNA sequence for clone 26825.

[0670] SEQ ID NO:628 is the determined cDNA sequence for clone 26826.

[0671] SEQ ID NO:629 is the determined cDNA sequence for clone 26827.

[0672] SEQ ID NO:630 is the determined cDNA sequence for clone 26829.

[0673] SEQ ID NO:631 is the determined cDNA sequence for clone 26830.

[0674] SEQ ID NO:632 is the determined cDNA sequence for clone 26831.

[0675] SEQ ID NO:633 is the determined cDNA sequence for clone 26832.

[0676] SEQ ID NO:634 is the determined cDNA sequence for clone 26835.

[0677] SEQ ID NO:635 is the determined cDNA sequence for clone 26836.

[0678] SEQ ID NO:636 is the determined cDNA sequence for clone 26837.

[0679] SEQ ID NO:637 is the determined cDNA sequence for clone 26839.

[0680] SEQ ID NO:638 is the determined cDNA sequence for clone 26841.

[0681] SEQ ID NO:639 is the determined cDNA sequence for clone 26843.

[0682] SEQ ID NO:640 is the determined cDNA sequence for clone 26844.

[0683] SEQ ID NO:641 is the determined cDNA sequence for clone 26845.

[0684] SEQ ID NO:642 is the determined cDNA sequence for clone 26846.

[0685] SEQ ID NO:643 is the determined cDNA sequence for clone 26847.

[0686] SEQ ID NO:644 is the determined cDNA sequence for clone 26848.

[0687] SEQ ID NO:645 is the determined cDNA sequence for clone 26849.

[0688] SEQ ID NO:646 is the determined cDNA sequence for clone 26850.

[0689] SEQ ID NO:647 is the determined cDNA sequence for clone 26851.

[0690] SEQ ID NO:648 is the determined cDNA sequence for clone 26852.

[0691] SEQ ID NO:649 is the determined cDNA sequence for clone 26853.

[0692] SEQ ID NO:650 is the determined cDNA sequence for clone 26854.

[0693] SEQ ID NO:651 is the determined cDNA sequence for clone 26856.

[0694] SEQ ID NO:652 is the determined cDNA sequence for clone 26857.

[0695] SEQ ID NO:653 is the determined cDNA sequence for clone 26858.

[0696] SEQ ID NO:654 is the determined cDNA sequence for clone 26859.

[0697] SEQ ID NO:655 is the determined cDNA sequence for clone 26860.

[0698] SEQ ID NO:656 is the determined cDNA sequence for clone 26862.

[0699] SEQ ID NO:657 is the determined cDNA sequence for clone 26863.

[0700] SEQ ID NO:658 is the determined cDNA sequence for clone 26864.

[0701] SEQ ID NO:659 is the determined cDNA sequence for clone 26865.

[0702] SEQ ID NO:660 is the determined cDNA sequence for clone 26867.

[0703] SEQ ID NO:661 is the determined cDNA sequence for clone 26868.

[0704] SEQ ID NO:662 is the determined cDNA sequence for clone 26871.

[0705] SEQ ID NO:663 is the determined cDNA sequence for clone 26873.

[0706] SEQ ID NO:664 is the determined cDNA sequence for clone 26875.

[0707] SEQ ID NO:665 is the determined cDNA sequence for clone 26876.

[0708] SEQ ID NO:666 is the determined cDNA sequence for clone 26877.

[0709] SEQ ID NO:667 is the determined cDNA sequence for clone 26878.

[0710] SEQ ID NO:668 is the determined cDNA sequence for clone 26880.

[0711] SEQ ID NO:669 is the determined cDNA sequence for clone 26882.

[0712] SEQ ID NO:670 is the determined cDNA sequence for clone 26883.

[0713] SEQ ID NO:671 is the determined cDNA sequence for clone 26884.

[0714] SEQ ID NO:672 is the determined cDNA sequence for clone 26885.

[0715] SEQ ID NO:673 is the determined cDNA sequence for clone 26886.

[0716] SEQ ID NO:674 is the determined cDNA sequence for clone 26887.

[0717] SEQ ID NO:675 is the determined cDNA sequence for clone 26888.

[0718] SEQ ID NO:676 is the determined cDNA sequence for clone 26889.

[0719] SEQ ID NO:677 is the determined cDNA sequence for clone 26890.

[0720] SEQ ID NO:678 is the determined cDNA sequence for clone 26892.

[0721] SEQ ID NO:679 is the determined cDNA sequence for clone 26894.

[0722] SEQ ID NO:680 is the determined cDNA sequence for clone 26895.

[0723] SEQ ID NO:681 is the determined cDNA sequence for clone 26897.

[0724] SEQ ID NO:682 is the determined cDNA sequence for clone 26898.

[0725] SEQ ID NO:683 is the determined cDNA sequence for clone 26899.

[0726] SEQ ID NO:684 is the determined cDNA sequence for clone 26900.

[0727] SEQ ID NO:685 is the determined cDNA sequence for clone 26901.

[0728] SEQ ID NO:686 is the determined cDNA sequence for clone 26903.

[0729] SEQ ID NO:687 is the determined cDNA sequence for clone 26905.

[0730] SEQ ID NO:688 is the determined cDNA sequence for clone 26906.

[0731] SEQ ID NO:689 is the determined cDNA sequence for clone 26708.

[0732] SEQ ID NO:690 is the determined cDNA sequence for clone 26709.

[0733] SEQ ID NO:691 is the determined cDNA sequence for clone 26710.

[0734] SEQ ID NO:692 is the determined cDNA sequence for clone 26711.

[0735] SEQ ID NO:693 is the determined cDNA sequence for clone 26712.

[0736] SEQ ID NO:694 is the determined cDNA sequence for clone 26713.

[0737] SEQ ID NO:695 is the determined cDNA sequence for clone 26714.

[0738] SEQ ID NO:696 is the determined cDNA sequence for clone 26715.

[0739] SEQ ID NO:697 is the determined cDNA sequence for clone 26716.

[0740] SEQ ID NO:698 is the determined cDNA sequence for clone 26717.

[0741] SEQ ID NO:699 is the determined cDNA sequence for clone 26718.

[0742] SEQ ID NO:700 is the determined cDNA sequence for clone 26719.

[0743] SEQ ID NO:701 is the determined cDNA sequence for clone 26720.

[0744] SEQ ID NO:702 is the determined cDNA sequence for clone 26721.

[0745] SEQ ID NO:703 is the determined cDNA sequence for clone 26722.

[0746] SEQ ID NO:704 is the determined cDNA sequence for clone 26723.

[0747] SEQ ID NO:705 is the determined cDNA sequence for clone 26724.

[0748] SEQ ID NO:706 is the determined cDNA sequence for clone 26725.

[0749] SEQ ID NO:707 is the determined cDNA sequence for clone 26726.

[0750] SEQ ID NO:708 is the determined cDNA sequence for clone 26727.

[0751] SEQ ID NO:709 is the determined cDNA sequence for clone 26728.

[0752] SEQ ID NO:710 is the determined cDNA sequence for clone 26729.

[0753] SEQ ID NO:711 is the determined cDNA sequence for clone 26730.

[0754] SEQ ID NO:712 is the determined cDNA sequence for clone 26731.

[0755] SEQ ID NO:713 is the determined cDNA sequence for clone 26732.

[0756] SEQ ID NO:714 is the determined cDNA sequence for clone 26733.1.

[0757] SEQ ID NO:715 is the determined cDNA sequence for clone 26733.2.

[0758] SEQ ID NO:716 is the determined cDNA sequence for clone 26734.

[0759] SEQ ID NO:717 is the determined cDNA sequence for clone 26735.

[0760] SEQ ID NO:718 is the determined cDNA sequence for clone 26736.

[0761] SEQ ID NO:719 is the determined cDNA sequence for clone 26737.

[0762] SEQ ID NO:720 is the determined cDNA sequence for clone 26738.

[0763] SEQ ID NO:721 is the determined cDNA sequence for clone 26739.

[0764] SEQ ID NO:722 is the determined cDNA sequence for clone 26741.

[0765] SEQ ID NO:723 is the determined cDNA sequence for clone 26742.

[0766] SEQ ID NO:724 is the determined cDNA sequence for clone 26743.

[0767] SEQ ID NO:725 is the determined cDNA sequence for clone 26744.

[0768] SEQ ID NO:726 is the determined cDNA sequence for clone 26745.

[0769] SEQ ID NO:727 is the determined cDNA sequence for clone 26746.

[0770] SEQ ID NO:728 is the determined cDNA sequence for clone 26747.

[0771] SEQ ID NO:729 is the determined cDNA sequence for clone 26748.

[0772] SEQ ID NO:730 is the determined cDNA sequence for clone 26749.

[0773] SEQ ID NO:731 is the determined cDNA sequence for clone 26750.

[0774] SEQ ID NO:732 is the determined cDNA sequence for clone 26751.

[0775] SEQ ID NO:733 is the determined cDNA sequence for clone 26752.

[0776] SEQ ID NO:734 is the determined cDNA sequence for clone 26753.

[0777] SEQ ID NO:735 is the determined cDNA sequence for clone 26754.

[0778] SEQ ID NO:736 is the determined cDNA sequence for clone 26755.

[0779] SEQ ID NO:737 is the determined cDNA sequence for clone 26756.

[0780] SEQ ID NO:738 is the determined cDNA sequence for clone 26757.

[0781] SEQ ID NO:739 is the determined cDNA sequence for clone 26758.

[0782] SEQ ID NO:740 is the determined cDNA sequence for clone 26759.

[0783] SEQ ID NO:741 is the determined cDNA sequence for clone 26760.

[0784] SEQ ID NO:742 is the determined cDNA sequence for clone 26761.

[0785] SEQ ID NO:743 is the determined cDNA sequence for clone 26762.

[0786] SEQ ID NO:744 is the determined cDNA sequence for clone 26763.

[0787] SEQ ID NO:745 is the determined cDNA sequence for clone 26764.

[0788] SEQ ID NO:746 is the determined cDNA sequence for clone 26765.

[0789] SEQ ID NO:747 is the determined cDNA sequence for clone 26766.

[0790] SEQ ID NO:748 is the determined cDNA sequence for clone 26767.

[0791] SEQ ID NO:749 is the determined cDNA sequence for clone 26768.

[0792] SEQ ID NO:750 is the determined cDNA sequence for clone 26769.

[0793] SEQ ID NO:751 is the determined cDNA sequence for clone 26770.

[0794] SEQ ID NO:752 is the determined cDNA sequence for clone 26771.

[0795] SEQ ID NO:753 is the determined cDNA sequence for clone 26772.

[0796] SEQ ID NO:754 is the determined cDNA sequence for clone 26773.

[0797] SEQ ID NO:755 is the determined cDNA sequence for clone 26774.

[0798] SEQ ID NO:756 is the determined cDNA sequence for clone 26775.

[0799] SEQ ID NO:757 is the determined cDNA sequence for clone 26776.

[0800] SEQ ID NO:758 is the determined cDNA sequence for clone 26777.

[0801] SEQ ID NO:759 is the determined cDNA sequence for clone 26778.

[0802] SEQ ID NO:760 is the determined cDNA sequence for clone 26779.

[0803] SEQ ID NO:761 is the determined cDNA sequence for clone 26781.

[0804] SEQ ID NO:762 is the determined cDNA sequence for clone 26782.

[0805] SEQ ID NO:763 is the determined cDNA sequence for clone 26783.

[0806] SEQ ID NO:764 is the determined cDNA sequence for clone 26784.

[0807] SEQ ID NO:765 is the determined cDNA sequence for clone 26785.

[0808] SEQ ID NO:766 is the determined cDNA sequence for clone 26786.

[0809] SEQ ID NO:767 is the determined cDNA sequence for clone 26787.

[0810] SEQ ID NO:768 is the determined cDNA sequence for clone 26788.

[0811] SEQ ID NO:769 is the determined cDNA sequence for clone 26790.

[0812] SEQ ID NO:770 is the determined cDNA sequence for clone 26791.

[0813] SEQ ID NO:771 is the determined cDNA sequence for clone 26792.

[0814] SEQ ID NO:772 is the determined cDNA sequence for clone 26793.

[0815] SEQ ID NO:773 is the determined cDNA sequence for clone 26794.

[0816] SEQ ID NO:774 is the determined cDNA sequence for clone 26795.

[0817] SEQ ID NO:775 is the determined cDNA sequence for clone 26796.

[0818] SEQ ID NO:776 is the determined cDNA sequence for clone 26797.

[0819] SEQ ID NO:777 is the determined cDNA sequence for clone 26798.

[0820] SEQ ID NO:778 is the determined cDNA sequence for clone 26800.

[0821] SEQ ID NO:779 is the determined cDNA sequence for clone 26801.

[0822] SEQ ID NO:780 is the determined cDNA sequence for clone 26802.

[0823] SEQ ID NO:781 is the determined cDNA sequence for clone 26803.

[0824] SEQ ID NO:782 is the determined cDNA sequence for clone 26804.

[0825] SEQ ID NO:783 is the amino acid sequence for L773P.

[0826] SEQ ID NO:784 is the determined DNA sequence of the L773P expression construct.

[0827] SEQ ID NO:785 is the determined DNA sequence of the L773 PA expression construct.

[0828] SEQ ID NO:786 is a predicted amino acid sequence for L552S.

[0829] SEQ ID NO:787 is a predicted amino acid sequence for L840P.

[0830] SEQ ID NO:788 is the full-length cDNA sequence for L548S.

[0831] SEQ ID NO:789 is the amino acid sequence encoded by SEQ ID NO:788.

[0832] SEQ ID NO:790 is an extended cDNA sequence for L552S.

[0833] SEQ ID NO:791 is the predicted amino acid sequence encoded by the cDNA sequence of SEQ ID NO:790.

[0834] SEQ ID NO:792 is the determined cDNA sequence for an isoform of L552S.

[0835] SEQ ID NO:793 is the predicted amino acid sequence encoded by SEQ ID NO:792.

[0836] SEQ ID NO:794 is an extended cDNA sequence for L840P.

[0837] SEQ ID NO:795 is the predicted amino acid sequence encoded by SEQ DI NO:794.

[0838] SEQ ID NO:796 is an extended cDNA sequence for L801P.

[0839] SEQ ID NO:797 is a first predicted amino acid sequence encoded by SEQ ID NO:796.

[0840] SEQ ID NO:798 is a second predicted amino acid sequence encoded by SEQ ID NO:796.

[0841] SEQ ID NO:799 is a third predicted amino acid sequence encoded by SEQ ID NO:796.

[0842] SEQ ID NO:800 is the determined full-length sequence for L844P.

[0843] SEQ ID NO:801 is the 5′ consensus cDNA sequence for L551S.

[0844] SEQ ID NO:802 is the 3′ consensus cDNA sequence for L551S.

[0845] SEQ ID NO:803 is the cDNA sequence for STY8.

[0846] SEQ ID NO:804 is an extended cDNA sequence for L551S.

[0847] SEQ ID NO:805 is the amino acid sequence for STY8.

[0848] SEQ ID NO:806 is the extended amino acid sequence for L551S.

[0849] SEQ ID NO:807 is the determined full length cDNA sequence for L773P.

[0850] SEQ ID NO:808 is the full-length cDNA sequence of L552S.

[0851] SEQ ID NO:809 is the full-length amino acid sequence of L552S.

[0852] SEQ ID NO:810 is the determined cDNA sequence of clone 50989.

[0853] SEQ ID NO:811 is the determined cDNA sequence of clone 50990.

[0854] SEQ ID NO:812 is the determined cDNA sequence of clone 50992.

[0855] SEQ ID NO:813-824 are the determined cDNA sequences for clones isolated from lung tumor tissue.

[0856] SEQ ID NO:825 is the determined cDNA sequence for the full-length L551S clone 54305.

[0857] SEQ ID NO:826 is the determined cDNA sequence for the full-length L551S clone 54298.

[0858] SEQ ID NO:827 is the full-length amino acid sequence for L551 S.

[0859] Tables 1-6 contain the sequence identifiers for SEQ ID NO:828-1664.

TABLE 1A

| | CLONE | | CLONE |
|---|---|---|---|
| SEQ ID NO: | IDENTIFIER | SEQ ID NO: | IDENTIFIER |
| 828 | R0126:A02 | 869 | R0126:D12 |
| 829 | R0126:A03 | 870 | R0126:E01 |
| 830 | R0126:A05 | 871 | R0126:E02 |
| 831 | R0126:A06 | 872 | R0126:E03 |
| 832 | R0126:A08 | 873 | R0126:E04 |
| 833 | R0126:A09 | 874 | R0126:E05 |
| 834 | R0126:A10 | 875 | R0126:E06 |
| 835 | R0126:A11 | 876 | R0126:E07 |
| 836 | R0126:A12 | 877 | R0126:E08 |
| 837 | R0126:B01 | 878 | R0126:E09 |
| 838 | R0126:B03 | 879 | R0126:E10 |
| 839 | R0126:B04 | 880 | R0126:E11 |
| 840 | R0126:B05 | 881 | R0126:E12 |
| 841 | R0126:B06 | 882 | R0126:F01 |
| 842 | R0126:B07 | 883 | R0126:F02 |
| 843 | R0126:B08 | 884 | R0126:F03 |
| 844 | R0126:B09 | 885 | R0126:F04 |
| 845 | R0126:B11 | 886 | R0126:F05 |
| 846 | R0126:B12 | 887 | R0126:F06 |
| 847 | R0126:C01 | 888 | R0126:F07 |
| 848 | R0126:C02 | 889 | R0126:F08 |
| 849 | R0126:C03 | 890 | R0126:F10 |
| 850 | R0126:C05 | 891 | R0126:F11 |
| 851 | R0126:C06 | 892 | R0126:F12 |
| 852 | R0126:C07 | 893 | R0126:G01 |
| 853 | R0126:C08 | 894 | R0126:G02 |
| 854 | R0126:C09 | 895 | R0126:G03 |
| 855 | R0126:C10 | 896 | R0126:G04 |
| 856 | R0126:C11 | 897 | R0126:G05 |
| 857 | R0126:C12 | 898 | R0126:G06 |
| 858 | R0126:D01 | 899 | R0126:G07 |
| 859 | R0126:D02 | 900 | R0126:G09 |
| 860 | R0126:D03 | 901 | R0126:G10 |
| 861 | R0126:D04 | 902 | R0126:G11 |
| 862 | R0126:D05 | 903 | R0126:G12 |
| 863 | R0126:D06 | 904 | R0126:H01 |
| 864 | R0126:D07 | 905 | R0126:H02 |
| 865 | R0126:D08 | 906 | R0126:H03 |
| 866 | R0126:D09 | 907 | R0126:H04 |
| 867 | R0126:D10 | 908 | R0126:H05 |
| 868 | R0126:D11 | 909 | R0126:H06 |

[0860] TABLE 1B

| | CLONE | | CLONE |
|---|---|---|---|
| SEQ ID NO | IDENTIFIER | SEQ ID NO | IDENTIFIER |
| 910 | R0126:H07 | 951 | R0127:D10 |
| 911 | R0126:H09 | 952 | R0127:D11 |
| 912 | R0126:H10 | 953 | R0127:D12 |
| 913 | R0126:H11 | 954 | R0127:E02 |
| 914 | R0127:A02 | 955 | R0127:E03 |
| 915 | R0127:A05 | 956 | R0127:E04 |
| 916 | R0127:A06 | 957 | R0127:E05 |
| 917 | R0127:A07 | 958 | R0127:E06 |
| 918 | R0127:A08 | 959 | R0127:E07 |
| 919 | R0127:A09 | 960 | R0127:E08 |
| 920 | R0127:A10 | 961 | R0127:E09 |
| 921 | R0127:A11 | 962 | R0127:E10 |
| 922 | R0127:A12 | 963 | R0127:E11 |
| 923 | R0127:B01 | 964 | R0127:F01 |
| 924 | R0127:B03 | 965 | R0127:F02 |
| 925 | R0127:B04 | 966 | R0127:F03 |
| 926 | R0127:B05 | 967 | R0127:F04 |
| 927 | R0127:B06 | 968 | R0127:F05 |
| 928 | R0127:B07 | 969 | R0127:F06 |
| 929 | R0127:B08 | 970 | R0127:F07 |
| 930 | R0127:B09 | 971 | R0127:F08 |
| 931 | R0127:B10 | 972 | R0127:F10 |
| 932 | R0127:B11 | 973 | R0127:F11 |
| 933 | R0127:B12 | 974 | R0127:F12 |
| 934 | R0127:C01 | 975 | R0127:G01 |
| 935 | R0127:C03 | 976 | R0127:G02 |
| 936 | R0127:C04 | 977 | R0127:G03 |
| 937 | R0127:C05 | 978 | R0127:G04 |
| 938 | R0127:C07 | 979 | R0127:G05 |
| 939 | R0127:C08 | 980 | R0127:G06 |
| 940 | R0127:C09 | 981 | R0127:G07 |
| 941 | R0127:C10 | 982 | R0127:G08 |
| 942 | R0127:C11 | 983 | R0127:G09 |
| 943 | R0127:D01 | 984 | R0127:G10 |
| 944 | R0127:D02 | 985 | R0127:G11 |
| 945 | R0127:D03 | 986 | R0127:G12 |
| 946 | R0127:D04 | 987 | R0127:H01 |
| 947 | R0127:D05 | 988 | R0127:H02 |
| 948 | R0127:D06 | 989 | R0127:H03 |
| 949 | R0127:D07 | 990 | R0127:H04 |
| 950 | R0127:D01 | 991 | R0127:H05 |

[0861] TABLE 1C

| | CLONE | | CLONE |
|---|---|---|---|
| SEQ ID NO | IDENTIFIER | SEQ ID NO | IDENTIFIER |
| 992 | R0127:H06 | 1034 | R0128:D11 |
| 993 | R0127:H07 | 1035 | R0128:D12 |
| 994 | R0127:H08 | 1036 | R0128:E01 |
| 995 | R1027:H09 | 1037 | R0128:E02 |
| 996 | R1027:H10 | 1038 | R0128:E03 |
| 997 | R1027:H11 | 1039 | R0128:E04 |
| 998 | R1028:A02 | 1040 | R0128:E05 |
| 999 | R1028:A05 | 1041 | R0128:E06 |
| 1000 | R1028:A06 | 1042 | R0128:E07 |
| 1001 | R1028:A07 | 1043 | R0128:E08 |
| 1002 | R1028:A08 | 1044 | R0128:E09 |
| 1003 | R1028:A09 | 1045 | R0128:E10 |
| 1004 | R1028:A10 | 1046 | R0128:E12 |
| 1005 | R1028:B01 | 1047 | R0128:F01 |
| 1006 | R1028:B02 | 1048 | R0128:F02 |
| 1007 | R1028:B03 | 1049 | R0128:F03 |
| 1008 | R1028:B04 | 1050 | R0128:F04 |
| 1009 | R1028:B05 | 1051 | R0128:F06 |
| 1010 | R1028:B08 | 1052 | R0128:F07 |
| 1011 | R1028:B09 | 1053 | R0128:F08 |
| 1012 | R1028:B10 | 1054 | R0128:F09 |
| 1013 | R1028:B11 | 1055 | R0128:F10 |
| 1014 | R1028:B12 | 1056 | R0128:F12 |
| 1015 | R1028:C01 | 1057 | R0128:G01 |
| 1016 | R1028:C03 | 1058 | R0128:G02 |
| 1017 | R1028:C04 | 1059 | R0128:G03 |
| 1018 | R1028:C05 | 1060 | R0128:G04 |
| 1019 | R1028:C06 | 1061 | R0128:G05 |
| 1020 | R1028:C07 | 1062 | R0128:G06 |
| 1021 | R1028:C08 | 1063 | R0128:G07 |
| 1022 | R1028:C10 | 1064 | R0128:G09 |
| 1023 | R1028:C11 | 1065 | R0128:G10 |
| 1024 | R1028:C12 | 1066 | R0128:G11 |
| 1025 | R1028:D01 | 1067 | R0128:G12 |
| 1026 | R1028:D02 | 1068 | R0128:H01 |
| 1027 | R1028:D04 | 1069 | R0128:H02 |
| 1028 | R1028:D05 | 1070 | RO128:H03 |
| 1029 | R1028:D06 | 1071 | R0128:H04 |
| 1030 | R1028:D07 | 1072 | R0128:H05 |
| 1031 | R1028:D08 | 1073 | R0128:H06 |
| 1032 | R1028:D09 | 1074 | R0128:H07 |
| 1033 | R0128:D10 | 1075 | R0128:H08 |

[0862] TABLE 1D

| | CLONE | | CLONE |
|---|---|---|---|
| SEQ ID NO | IDENTIFIER | SEQ ID NO | IDENTIFIER |
| 1076 | R0128:H09 | 1118 | R0130:D12 |
| 1077 | R0128:H10 | 1119 | R0130:E01 |
| 1078 | R0128:H11 | 1120 | R0130:E02 |
| 1079 | R0130:A02 | 1121 | R0130:E03 |
| 1080 | R0130:A05 | 1122 | R0130:E04 |
| 1081 | R0130:A06 | 1123 | R0130:E05 |
| 1082 | R0130:A08 | 1124 | R0130:E06 |
| 1083 | R0130:A09 | 1125 | R0130:E07 |
| 1084 | R0130:A10 | 1126 | R0130:E08 |
| 1085 | R0130:A11 | 1127 | R0130:E09 |
| 1086 | R0130:A12 | 1128 | R0130:E10 |
| 1087 | R0130:B01 | 1129 | R0130:E11 |
| 1088 | R0130:B02 | 1130 | R0130:E12 |
| 1089 | R0130:B03 | 1131 | R0130:F02 |
| 1090 | R0130:B04 | 1132 | R0130:F03 |
| 1091 | R0130:B05 | 1133 | R0130:F05 |
| 1092 | R0130:B06 | 1134 | R0130:F06 |
| 1093 | R0130:B08 | 1135 | R0130:F07 |
| 1094 | R0130:B09 | 1136 | R0130:F08 |
| 1095 | R0130:B10 | 1137 | R0130:F09 |
| 1096 | R0130:B11 | 1138 | R0130:F10 |
| 1097 | R0130:B12 | 1139 | R0130:F11 |
| 1098 | R0130:C02 | 1140 | R0130:F12 |
| 1099 | R0130:C03 | 1141 | R0130:G01 |
| 1100 | R0130:C04 | 1142 | R0130:G02 |
| 1101 | R0130:C05 | 1143 | R0130:G03 |
| 1102 | R0130:C06 | 1144 | R0130:G04 |
| 1103 | R0130:C07 | 1145 | R0130:G05 |
| 1104 | R0130:C08 | 1146 | R0130:G06 |
| 1105 | R0130:C09 | 1147 | R0130:G07 |
| 1106 | R0130:C10 | 1148 | R0130:G08 |
| 1107 | R0130:C11 | 1149 | R0130:G09 |
| 1108 | R0130:C12 | 1150 | R0130:G10 |
| 1109 | R0130:D02 | 1151 | R0130:G11 |
| 1110 | R0130:D03 | 1152 | R0130:G12 |
| 1111 | R0130:D04 | 1153 | R0130:H01 |
| 1112 | R0130:D05 | 1154 | R0130:H02 |
| 1113 | R0130:D06 | 1155 | R0130:H04 |
| 1114 | R0130:D07 | 1156 | R0130:H05 |
| 1115 | R0130:D09 | 1157 | R0130:H06 |
| 1116 | R0130:D10 | 1158 | R0130:H07 |
| 1117 | R0130:D11 | 1159 | R0130:H08 |

[0863] TABLE 1E

| | CLONE | | CLONE |
|---|---|---|---|
| SEQ ID NO | IDENTIFIER | SEQ ID NO | IDENTIFIER |
| 1160 | R0130:H09 | 1200 | R0131:E01 |
| 1161 | R0130:H10 | 1201 | R0131:E02 |
| 1162 | R0130:H11 | 1202 | R0131:E03 |
| 1163 | R0131:A02 | 1203 | R0131:E04 |
| 1164 | R0131:A05 | 1204 | R0131:E06 |
| 1165 | R0131:A06 | 1205 | R0131:E07 |
| 1166 | R0131:A07 | 1206 | R0131:E08 |
| 1167 | R0131:A08 | 1207 | R0131:E10 |
| 1168 | R0131:A09 | 1208 | R0131:E11 |
| 1169 | R0131:A11 | 1209 | R0131:E12 |
| 1170 | R0131:A12 | 1210 | R0131:F02 |
| 1171 | R0131:B02 | 1211 | R0131:F04 |
| 1172 | R0131:B03 | 1212 | R0131:F05 |
| 1173 | R0131:B04 | 1213 | R0131:F06 |
| 1174 | R0131:B05 | 1214 | R0131:F07 |
| 1175 | R0131:B07 | 1215 | R0131:F08 |
| 1176 | R0131:B08 | 1216 | R0131:F09 |
| 1177 | R0131:B09 | 1217 | R0131:F10 |
| 1178 | R0131:B10 | 1218 | R0131:F11 |
| 1179 | R0131:B11 | 1219 | R0131:F12 |
| 1180 | R0131:C01 | 1220 | R0131:G01 |
| 1181 | R0131:C02 | 1221 | R0131:G02 |
| 1182 | R0131:C03 | 1222 | R0131:G03 |
| 1183 | R0131:C04 | 1223 | R0131:G04 |
| 1184 | R0131:C06 | 1224 | R0131:G05 |
| 1185 | R0131:C07 | 1225 | R0131:G06 |
| 1186 | R0131:C08 | 1226 | R0131:G07 |
| 1187 | R0131:C10 | 1227 | R0131:G08 |
| 1188 | R0131:C11 | 1228 | R0131:G09 |
| 1189 | R0131:C12 | 1229 | R0131:G10 |
| 1190 | R0131:D02 | 1230 | R0131:G11 |
| 1191 | R0131:D03 | 1231 | R0131:G12 |
| 1192 | R0131:D04 | 1232 | R0131:H01 |
| 1193 | R0131:D05 | 1233 | R0131:H02 |
| 1194 | R0131:D06 | 1234 | R0131:H05 |
| 1195 | R0131:D07 | 1235 | R0131:H06 |
| 1196 | R0131:D09 | 1236 | R0131:H07 |
| 1197 | R0131:D10 | 1237 | R0131:H08 |
| 1198 | R0131:D11 | 1238 | R0131:H09 |
| 1199 | R0131:D12 | 1239 | R0131:H11 |

[0864] TABLE 2
Clone names for NSCLC-SQL1 and corresponding SEQ ID NOs

| | CLONE |
|---|---|
| SEQ ID NO | IDENTIFIER |
| 1240 | Contig 54 |
| 1241 | Contig 55 |
| 1242 | Contig 57 |
| 1243 | Contig 58 |
| 1244 | Contig 60 |
| 1245 | Contig 62 |
| 1246 | Contig 63 |
| 1247 | Contig 64 |
| 1248 | Contig 65 |
| 1249 | Contig 66 |
| 1250 | Contig 67 |
| 1251 | Contig 68 |
| 1252 | Contig 69 |
| 1253 | Contig 70 |
| 1254 | Contig 71 |
| 1255 | Contig 72 |
| 1256 | Contig 73 |
| 1257 | Contig 74 |
| 1258 | Contig 75 |
| 1259 | Contig 77 |
| 1260 | Contig 78 |
| 1261 | Contig 79 |
| 1262 | Contig 80 |
| 1263 | Contig 81 |
| 1264 | Contig 83 |
| 1265 | Contig 84 |
| 1266 | Contig 86 |
| 1267 | Contig 87 |
| 1268 | Contig 88 |
| 1269 | Contig 89 |
| 1270 | Contig 90 |
| 1271 | Contig 91 |
| 1272 | Contig 92 |
| 1273 | Contig 94 |
| 1274 | Contig 95 |
| 1275 | Contig 96 |
| 1276 | Contig 97 |
| 1277 | Contig 98 |
| 1278 | Contig 99 |
| 1279 | Contig 100 |

[0865] TABLE 3
Clone names for NSCLC-SCLI and corresponding SEQ ID NOs

| | CLONE |
|---|---|
| SEQ ID NO | IDENTIFIER |
| 1280 | Contig 38 |
| 1281 | Contig 39 |
| 1282 | Contig 40 |
| 1283 | Contig 41 |
| 1284 | Contig 42 |
| 1285 | Contig 43 |
| 1286 | Contig 44 |
| 1287 | Contig 45 |
| 1288 | Contig 46 |
| 1289 | Contig 47 |
| 1290 | Contig 48 |
| 1291 | Contig 49 |
| 1292 | Contig 51 |
| 1293 | Contig 52 |
| 1294 | Contig 53 |
| 1295 | Contig 54 |
| 1296 | Contig 55 |
| 1297 | Contig 56 |
| 1298 | Contig 57 |
| 1299 | Contig 58 |
| 1300 | Contig 59 |
| 1301 | Contig 60 |
| 1302 | Contig 62 |
| 1303 | Contig 63 |
| 1304 | Contig 64 |
| 1305 | Contig 65 |
| 1306 | Contig 66 |
| 1307 | Contig 67 |
| 1308 | Contig 68 |
| 1309 | Contig 69 |
| 1310 | Contig 70 |
| 1311 | Contig 72 |
| 1312 | Contig 73 |
| 1313 | Contig 75 |
| 1314 | Contig 76 |
| 1315 | Contig 77 |
| 1316 | Contig 78 |
| 1317 | Contig 79 |
| 1318 | Contig 80 |
| 1319 | Contig 81 |
| 1320 | Contig 82 |

[0866] TABLE 4A
Clone names for NSCLC-SCL3-SCL4 and corresponding SEQ ID NOs

| | CLONE | | CLONE |
|---|---|---|---|
| SEQ ID NO | IDENTIFIER | SEQ ID NO | IDENTIFIER |
| 1321 | Contig 94 | 1363 | Contig 136 |
| 1322 | Contig 95 | 1364 | Contig 137 |
| 1323 | Contig 96 | 1365 | Contig 138 |
| 1324 | Contig 97 | 1366 | Contig 139 |
| 1325 | Contig 98 | 1367 | Contig 140 |
| 1326 | Contig 99 | 1368 | Contig 141 |
| 1327 | Contig 100 | 1369 | Contig 142 |
| 1328 | Contig 101 | 1370 | Contig 143 |
| 1329 | Contig 102 | 1371 | Contig 144 |
| 1330 | Contig 103 | 1372 | Contig 145 |
| 1331 | Contig 104 | 1373 | Contig 146 |
| 1332 | Contig 105 | 1374 | Contig 147 |
| 1333 | Contig 106 | 1375 | Contig 148 |
| 1334 | Contig 107 | 1376 | Contig 149 |
| 1335 | Contig 108 | 1377 | Contig 150 |
| 1336 | Contig 109 | 1378 | Contig 151 |
| 1337 | Contig 110 | 1379 | Contig 152 |
| 1338 | Contig 111 | 1380 | Contig 153 |
| 1339 | Contig 112 | 1381 | Contig 154 |
| 1340 | Contig 113 | 1382 | Contig 155 |
| 1341 | Contig 114 | 1383 | Contig 156 |
| 1342 | Contig 115 | 1384 | Contig 157 |
| 1343 | Contig 116 | 1385 | Contig 158 |
| 1344 | Contig 117 | 1386 | Contig 159 |
| 1345 | Contig 118 | 1387 | Contig 160 |
| 1346 | Contig 119 | 1388 | Contig 161 |
| 1347 | Contig 120 | 1389 | Contig 162 |
| 1348 | Contig 121 | 1390 | Contig 163 |
| 1349 | Contig 122 | 1391 | Contig 164 |
| 1350 | Contig 123 | 1392 | Contig 165 |
| 1351 | Contig 124 | 1393 | Contig 166 |
| 1352 | Contig 125 | 1394 | Contig 167 |
| 1353 | Contig 126 | 1395 | Contig 168 |
| 1354 | Contig 127 | 1396 | Contig 169 |
| 1355 | Contig 128 | 1397 | Contig 170 |
| 1356 | Contig 129 | 1398 | Contig 171 |
| 1357 | Contig 130 | 1399 | Contig 172 |
| 1358 | Contig 131 | 1400 | Contig 173 |
| 1359 | Contig 132 | 1401 | Contig 174 |
| 1360 | Contig 133 | 1402 | Contig 175 |
| 1361 | Contig 134 | 1403 | Contig 176 |
| 1362 | Contig 135 | | |

[0867] TABLE 4B
Clone names for NSCLC-SCL3-SCL4 and corresponding SEQ ID NOs

| | CLONE |
|---|---|
| SEQ ID NO | IDENTIFIER |
| 1404 | Contig 177 |
| 1405 | Contig 178 |
| 1406 | Contig 179 |
| 1407 | Contig 180 |
| 1408 | Contig 181 |
| 1409 | Contig 182 |
| 1410 | Contig 183 |
| 1411 | Contig 184 |
| 1412 | Contig 185 |
| 1413 | Contig 186 |
| 1414 | Contig 187 |

[0868] TABLE 5
Clone names for SCLC-SQL1 and corresponding SEQ ID NOs

| | CLONE |
|---|---|
| SEQ ID NO | IDENTIFIER |
| 1415 | Contig 17 |
| 1416 | Contig 18 |
| 1417 | Contig 20 |
| 1418 | Contig 23 |
| 1419 | Contig 24 |
| 1420 | Contig 25 |
| 1421 | Contig 26 |
| 1422 | Contig 27 |
| 1423 | Contig 28 |
| 1424 | Contig 29 |
| 1425 | Contig 30 |
| 1426 | Contig 31 |
| 1427 | Contig 20 |
| 1428 | Contig 21 |
| 1429 | Contig 22 |
| 1430 | Contig 23 |
| 1431 | Contig 24 |
| 1432 | Contig 25 |
| 1433 | Contig 26 |
| 1434 | Contig 27 |
| 1435 | Contig 28 |
| 1436 | Contig 29 |
| 1437 | Contig 30 |
| 1438 | Contig 31 |
| 1439 | Contig 32 |
| 1440 | Contig 33 |
| 1441 | Contig 34 |
| 1442 | Contig 35 |
| 1443 | Contig 36 |
| 1444 | Contig 37 |
| 1445 | Contig 38 |

[0869] TABLE 6A
Clone names for SCLC-SCL3-SCL4 and corresponding SEQ ID NOs

| | CLONE | | CLONE |
|---|---|---|---|
| SEQ ID NO | IDENTIFIER | SEQ ID NO | IDENTIFIER |
| 1446 | Contig 116 | 1488 | Contig 160 |
| 1447 | Contig 117 | 1489 | Contig 161 |
| 1448 | Contig 118 | 1490 | Contig 162 |
| 1449 | Contig 119 | 1491 | Contig 163 |
| 1450 | Contig 120 | 1492 | Contig 164 |
| 1451 | Contig 122 | 1493 | Contig 165 |
| 1452 | Contig 123 | 1494 | Contig 166 |
| 1453 | Contig 124 | 1495 | Contig 167 |
| 1454 | Contig 125 | 1496 | Contig 168 |
| 1455 | Contig 126 | 1497 | Contig 169 |
| 1456 | Contig 127 | 1498 | Contig 170 |
| 1457 | Contig 128 | 1499 | Contig 171 |
| 1458 | Contig 129 | 1500 | Contig 172 |
| 1459 | Contig 130 | 1501 | Contig 173 |
| 1460 | Contig 131 | 1502 | Contig 174 |
| 1461 | Contig 132 | 1503 | Contig 175 |
| 1462 | Contig 133 | 1504 | Contig 176 |
| 1463 | Contig 135 | 1505 | Contig 177 |
| 1464 | Contig 136 | 1506 | Contig 178 |
| 1465 | Contig 137 | 1507 | Contig 179 |
| 1466 | Contig 138 | 1508 | Contig 181 |
| 1467 | Contig 139 (L985P) | 1509 | Contig 182 |
| 1468 | Contig 140 | 1510 | Contig 183 |
| 1469 | Contig 141 | 1511 | Contig 184 |
| 1470 | Contig 142 | 1512 | Contig 185 |
| 1471 | Contig 143 | 1513 | Contig 186 |
| 1472 | Contig 144 | 1514 | Contig 187 |
| 1473 | Contig 145 | 1515 | Contig 189 |
| 1474 | Contig 146 | 1516 | Contig 190 |
| 1475 | Contig 147 | 1517 | Contig 191 |
| 1476 | Contig 148 | 1518 | Contig 192 |
| 1477 | Contig 149 | 1519 | Contig 193 |
| 1478 | Contig 150 | 1520 | Contig 194 |
| 1479 | Contig 151 | 1521 | Contig 195 |
| 1480 | Contig 152 | 1522 | Contig 196 |
| 1481 | Contig 153 | 1523 | Contig 197 |
| 1482 | Contig 154 | 1524 | Contig 198 |
| 1483 | Contig 155 | 1525 | Contig 199 |
| 1484 | Contig 156 | 1526 | Contig 200 |
| 1485 | Contig 157 | 1527 | Contig 201 |
| 1486 | Contig 158 | 1528 | Contig 202 |
| 1487 | Contig 159 | | |

[0870] TABLE 6B
Clone names for SCLC-SCL3-SCL4 and corresponding SEQ ID NOs

| | CLONE |
|---|---|
| SEQ ID NO | IDENTIFIER |
| 1529 | Contig 203 |
| 1530 | Contig 204 |
| 1531 | Contig 205 |
| 1532 | Contig 206 |
| 1533 | Contig 207 |
| 1534 | Contig 208 |
| 1535 | Contig 209 |
| 1536 | Contig 210 |
| 1537 | Contig 211 |
| 1538 | Contig 212 |
| 1539 | Contig 213 |
| 1540 | Contig 214 |
| 1541 | Contig 215 |
| 1542 | Contig 216 |
| 1543 | Contig 217 |
| 1544 | Contig 218 |
| 1545 | Contig 219 |
| 1546 | Contig 220 |
| 1547 | Contig 221 |
| 1548 | Contig 222 |
| 1549 | Contig 223 |
| 1550 | Contig 224 |
| 1551 | Contig 225 |
| 1552 | Contig 226 |
| 1553 | Contig 227 |
| 1554 | Contig 228 |
| 1555 | Contig 229 |
| 1556 | Contig 230 |
| 1557 | Contig 231 |
| 1558 | Contig 232 |
| 1559 | Contig 233 |
| 1560 | Contig 234 |
| 1561 | Contig 235 |
| 1562 | Contig 236 |
| 1563 | Contig 237 |

[0871] TABLE 7

| | CLONE | | CLONE |
|---|---|---|---|
| SEQ ID NO: | IDENTIFIER | SEQ ID NO: | IDENTIFIER |
| 1564 | R0124:E05 | 1609 | R0129:D09 |
| 1565 | R0124:E06 | 1610 | R0129:D10 |
| 1566 | R0124:E08 | 1611 | R0129:D11 |
| 1567 | R0124:F07 | 1612 | R0129:E02 |
| 1568 | R0124:F08 | 1613 | R0129:E03 |
| 1569 | R0124:F09 | 1614 | R0129:E04 |
| 1570 | R0124:G04 | 1615 | R0129:E05 |
| 1571 | R0129:A02 | 1616 | R0129:E06 |
| 1572 | R0129:A03 | 1617 | R0129:E07 |
| 1573 | R0129:A06 | 1618 | R0129:E08 |
| 1574 | R0129:A07 | 1619 | R0129:E09 |
| 1575 | R0129:A08 | 1620 | R0129:E11 |
| 1576 | R0129:A09 | 1621 | R0129:E12 |
| 1577 | R0129:A10 | 1622 | R0129:F01 |
| 1578 | R0129:A11 | 1623 | R0129:F02 |
| 1579 | R0129:A12 | 1624 | R0129:F03 |
| 1580 | R0129:B02 | 1625 | R0129:F04 |
| 1581 | R0129:B03 | 1626 | R0129:F06 |
| 1582 | R0129:B04 | 1627 | R0129:F07 |
| 1583 | R0129:B05 | 1628 | R0129:F08 |
| 1584 | R0129:B06 | 1629 | R0129:F09 |
| 1585 | R0129:B07 | 1630 | R0129:F10 |
| 1586 | R0129:B08 | 1631 | R0129:F11 |
| 1587 | R0129:B09 | 1632 | R0129:F12 |
| 1588 | R0129:B10 | 1633 | R0129:G01 |
| 1589 | R0129:B11 | 1634 | R0129:G02 |
| 1590 | R0129:B12 | 1635 | R0129:G03 |
| 1591 | R0129:C01 | 1636 | R0129:G04 |
| 1592 | R0129:C02 | 1637 | R0129:G05 |
| 1593 | R0129:C03 | 1638 | R0129:G06 |
| 1594 | R0129:C04 | 1639 | R0129:G07 |
| 1595 | R0129:C06 | 1640 | R0129:G08 |
| 1596 | R0129:C07 | 1641 | R0129:G09 |
| 1597 | R0129:C08 | 1642 | R0129:G10 |
| 1598 | R0129:C09 | 1643 | R0129:G11 |
| 1599 | R0129:C10 | 1644 | R0129:G12 |
| 1600 | R0129:C11 | 1645 | R0129:H01 |
| 1601 | R0129:C12 | 1646 | R0129:H02 |
| 1602 | R0129:D01 | 1647 | R0129:H03 |
| 1603 | R0129:D03 | 1648 | R0129:H04 |
| 1604 | R0129:D04 | 1649 | R0129:H05 |
| 1605 | R0129:D05 | 1650 | R0129:H08 |
| 1606 | R0129:D06 | 1651 | R0129:H09 |
| 1607 | R0129:D07 | 1652 | R0129:H10 |
| 1608 | R0129:D08 | 1653 | R0129:H11 |

[0872] TABLE 8

| | CLONE |
|---|---|
| SEQ ID NO: | IDENTIFIER |
| 1654 | 26484 |
| 1655 | 26496 |
| 1656 | 26517 |
| 1657 | 26531 |
| 1658 | 26022 |
| 1659 | 26026 |
| 1660 | 26810 |
| 1661 | 26815 |
| 1662 | 26869 |
| 1663 | 26883 |
| 1664 | 26902 |

[0873] SEQ ID NO:1665 and 1666 are primers used in the amplification of the coding region of L548S

[0874] SEQ ID NO:1667 is the protein sequence of expressed recombinant L7548S.

[0875] SEQ ID NO:1668 is the cDNA sequence of expressed recombinant L7548S.

[0876] SEQ ID NO:1669 is the extended cDNA sequence of clone #18971 (L801 P).

[0877] SEQ ID NO:1670 is the amino acid sequence of open reading frame ORF4 encoded by SEQ ID NO:1669.

[0878] SEQ ID NO:1671 is the amino acid sequence of open reading frame ORF5 encoded by SEQ ID NO:1669.

[0879] SEQ ID NO:1672 is the amino acid sequence of open reading frame ORF6 encoded by SEQ ID NO:1669.

[0880] SEQ ID NO:1673 is the amino acid sequence of open reading frame ORF7 encoded by SEQ ID NO:1669.

[0881] SEQ ID NO:1674 is the amino acid sequence of open reading frame ORF8 encoded by SEQ ID NO:1669.

[0882] SEQ ID NO:1675 is the amino acid sequence of open reading frame ORF9 encoded by SEQ ID NO:1669.

[0883] SEQ ID NO:1676 is the extended cDNA for contig 139 (SEQ ID NO:1467), also known as L985P.

[0884] SEQ ID NO:1677 is the L985P amino acid sequence encoded by SEQ ID NO:1676.

[0885] SEQ ID NO:1678 is the amino acid sequence of open reading frame ORF5X of SEQ ID NO:1669.

[0886] SEQ ID NO:1679 is the amino acid sequence of an open reading frame for contig 139 (SEQ ID NO:1467).

[0887] SEQ ID NO:1680-1788, set forth in the Table 9, represent cDNA clones identified by microarray analysis of the SQL1, SCL1, SCL3 and SCL4 libraries on lung chip 5.

TABLE 9

| | CLONE |
|---|---|
| SEQ ID NO: | IDENTIFIER |
| 1680 | 58456 |
| 1681 | 58458 |
| 1682 | 58462 |
| 1683 | 58469 |
| 1684 | 58470 |
| 1685 | 58482 |
| 1686 | 58485 |
| 1687 | 58501 |
| 1688 | 58502 |
| 1689 | 58505 |
| 1690 | 58507 |
| 1691 | 58509 |
| 1692 | 58512 |
| 1693 | 58527 |
| 1694 | 58529 |
| 1695 | 58531 |
| 1696 | 58537 |
| 1697 | 58539 |
| 1698 | 58545 |
| 1699 | 59319 |
| 1700 | 59322 |
| 1701 | 59348 |
| 1702 | 59350 |
| 1703 | 59363 |
| 1704 | 59365 |
| 1705 | 59370 |
| 1706 | 59373 |
| 1707 | 59376 |
| 1708 | 61050 |
| 1709 | 61051 |
| 1710 | 61052 |
| 1711 | 61054 |
| 1712 | 61056 |
| 1713 | 61057 |
| 1714 | 61060 |
| 1715 | 61062 |
| 1716 | 61063 |
| 1717 | 61064 |
| 1718 | 61065 |
| 1719 | 61066 |
| 1720 | 61069 |
| 1721 | 61070 |
| 1722 | 61071 |
| 1723 | 61074 |
| 1724 | 61075 |
| 1725 | 61077 |
| 1726 | 61079 |
| 1727 | 61080 |
| 1728 | 61081 |
| 1729 | 61083 |
| 1730 | 61085 |
| 1731 | 61086 |
| 1732 | 61088 |
| 1733 | 61090 |
| 1734 | 61091 |
| 1735 | 61093 |
| 1736 | 61094 |
| 1737 | 61096 |
| 1738 | 61097 |
| 1739 | 61099 |
| 1740 | 61100 |
| 1741 | 61103 |
| 1742 | 61105 |
| 1743 | 61106 |
| 1744 | 61110 |
| 1745 | 61113 |
| 1746 | 61115 |
| 1747 | 61117 |
| 1748 | 61118 |
| 1749 | 61119 |
| 1750 | 61120 |
| 1751 | 61122 |
| 1752 | 61125 |
| 1753 | 61126 |
| 1754 | 61130 |
| 1755 | 61133 |
| 1756 | 61134 |
| 1757 | 61135 |
| 1758 | 61137 |
| 1759 | 61139 |
| 1760 | 61143 |
| 1761 | 61144 |
| 1762 | 61148 |
| 1763 | 61151 |
| 1764 | 61155 |
| 1765 | 61156 |
| 1766 | 61159 |
| 1767 | 61160 |
| 1768 | 61163 |
| 1769 | 61167 |
| 1770 | 61172 |
| 1771 | 61173 |
| 1772 | 61176 |
| 1773 | 61177 |
| 1774 | 61183 |
| 1775 | 61185 |
| 1776 | 61188 |
| 1777 | 61192 |
| 1778 | 61198 |
| 1779 | 61201 |
| 1780 | 61202 |
| 1781 | 61204 |
| 1782 | 61206 |
| 1783 | 61210 |
| 1784 | 61212 |
| 1785 | 61216 |
| 1786 | 61225 |
| 1787 | 61226 |
| 1788 | 61227 |

[0888] SEQ ID NO:1789 is the cDNA sequence of clone #47988 (L972P).

[0889] SEQ ID NO:1790 is the cDNA sequence of clone #48005 (L979P).

[0890] SEQ ID NO:1791 is an extended cDNA sequence for clone #48005 (L979P).

[0891] SEQ ID NO:1792 is an extended cDNA sequence for clone #49826 (SEQ ID NO:1279; L980P).

[0892] SEQ ID NO:1793 is an extended cDNA sequence for clone #20631 (SEQ ID NO:117; L973P).

[0893] SEQ ID NO:1794 is an extended cDNA sequence for clone #20661 (SEQ ID NO:128; L974P).

[0894] SEQ ID NO:1795 is an extended cDNA sequence for clone #50430 (SEQ ID NO:1442; L996P).

[0895] SEQ ID NO:1796 is an extended cDNA sequence for clone #26961 (SEQ ID NO:288; L977P).

[0896] SEQ ID NO:1797 is an extended cDNA sequence for clone #24928 (SEQ ID NO:1339; L978P).

[0897] SEQ ID NO:1798 is an extended cDNA sequence for clone #50507 (SEQ ID NO:1446; L984P).

[0898] SEQ ID NO:1799 is an extended cDNA sequence for clone #50645 (SEQ ID NO:1531; L988P).

[0899] SEQ ID NO:1800 is an extended cDNA sequence for clone #50628 (SEQ ID NO:1533; L1423P).

[0900] SEQ ID NO:1801 is an extended cDNA sequence for clone #50560 (SEQ ID NO:1527; L987P).

[0901] SEQ ID NO:1802 is an extended cDNA sequence for clone #27699 (SEQ ID NO:468; L998P).

[0902] SEQ ID NO:1803 is an extended cDNA sequence for clone #59303 (SEQ ID NO:949; L1425P).

[0903] SEQ ID NO:1804 is an extended cDNA sequence for clone #59314 (SEQ ID NO:1156; L1426P).

[0904] SEQ ID NO:1805 is an extended cDNA sequence for clone #59298 (SEQ ID NO:921; L1427P).

[0905] SEQ ID NO:1806 is an amino acid sequence encoded by SEQ ID NO:1791.

[0906] SEQ ID NO:1807 is an amino acid sequence encoded by SEQ ID NO:1792.

[0907] SEQ ID NO:1808 is an amino acid sequence encoded by SEQ ID NO:1793.

[0908] SEQ ID NO:1809 is an amino acid sequence encoded by SEQ ID NO:1794.

[0909] SEQ ID NO:1810 is an amino acid sequence encoded by SEQ ID NO:1795.

[0910] SEQ ID NO:1811 is an amino acid sequence encoded by SEQ ID NO:1796.

[0911] SEQ ID NO:1812 is an amino acid sequence encoded by SEQ ID NO:1797.

[0912] SEQ ID NO:1813 is an amino acid sequence encoded by SEQ ID NO:1798.

[0913] SEQ ID NO:1814 is an amino acid sequence encoded by SEQ ID NO:1799.

[0914] SEQ ID NO:1815 is an amino acid sequence encoded by SEQ ID NO:1800.

[0915] SEQ ID NO:1816 is an amino acid sequence encoded by SEQ ID NO:1527 (L987P).

[0916] SEQ ID NO:1817 is an amino acid sequence encoded by SEQ ID NO:1823.

[0917] SEQ ID NO:1818 is an amino acid sequence encoded by SEQ ID NO:1801.

[0918] SEQ ID NO:1819 is an amino acid sequence encoded by SEQ ID NO:1802.

[0919] SEQ ID NO:1820 is an amino acid sequence encoded by SEQ ID NO:1803.

[0920] SEQ ID NO:1821 is an amino acid sequence encoded by SEQ ID NO:1804.

[0921] SEQ ID NO:1822 is an amino acid sequence encoded by SEQ ID NO:1805.

[0922] SEQ ID NO:1823 is an extended cDNA sequence for clone #50560 (SEQ ID NO:1527; L987P).

[0923] SEQ ID NO:1824 is a full length cDNA sequence for clone L872P (SEQ ID NO:34).

[0924] SEQ ID NO:1825 is the amino acid sequence encoded by SEQ ID NO:1824.

[0925] SEQ ID NO:1826 is the cDNA sequence encoding the N-terminal portion of L552S.

[0926] SEQ ID NO:1827-1829 are cDNA sequences of portions of L552S.

[0927] SEQ ID NO:1830 is the N-terminal portion of L552S.

[0928] SEQ ID NO:1831-1833 are the amino acid sequences encoded by SEQ ID NO:1827-1829, respectively.

[0929] SEQ ID NO:1834-1856 are the amino acid sequences of peptides of L548S.

[0930] SEQ ID NO:1857-1860 are PCR primers.

[0931] SEQ ID NO:1861 is the determined DNA sequence for a fusion of Ra12 and ORF4 of P801 P.

[0932] SEQ ID NO:1862 is the determined DNA sequence for a fusion of Ra12 and ORF5 of P801P.

[0933] SEQ ID NO:1863 is the amino acid sequence of the fusion of Ra12 and ORF4 of P801P.

[0934] SEQ ID NO:1864 is the amino acid sequence of the fusion of Ra12 and ORF5 of P801P.

[0935] SEQ ID NO:1865 is the determined cDNA sequence for clone L984P_(573A).

[0936] SEQ ID NO:1866 is the determined cDNA sequence for clone L984P_(512A).

[0937] SEQ ID NO:1867 is the determined cDNA sequence for clone L984P_(NCI-H128).

[0938] SEQ ID NO:1868 is the determined cDNA sequence for clone L984P_(DMS-79).

[0939] SEQ ID NO:1869 is the amino acid sequence encoded by SEQ ID NO:1865.

[0940] SEQ ID NO:1870 is the amino acid sequence encoded by SEQ ID NO:1866.

[0941] SEQ ID NO:1871 is the amino acid sequence encoded by SEQ ID NO:1867.

[0942] SEQ ID NO:1872 is the amino acid sequence encoded by SEQ ID NO:1868.

[0943] SEQ ID NO:1873 is a full length cDNA sequence for clone L985P (partial sequence given in SEQ ID NO:1467).

[0944] SEQ ID NO:1874 is the amino acid sequence for L985P encoded by SEQ ID NO:1873.

[0945] SEQ ID NO:1875 is the predicted and determined cDNA sequence for a fusion of Ra12 and L985P.

[0946] SEQ ID NO:1876 is the predicted amino acid sequence of a fusion of Ra12 and L985P encoded by SEQ ID NO:1875.

[0947] SEQ ID NO:1877 is the predicted cDNA sequence for a fusion of Ra12S and L985P.

[0948] SEQ ID NO:1878 is the predicted amino acid sequence of a fusion of Ra12S and L985P encoded by SEQ ID NO:1877.

[0949] SEQ ID NO:1879 is the predicted cDNA sequence for a fusion of Ra12S and L985PEx.

[0950] SEQ ID NO:1880 is the predicted amino acid sequence of a fusion of Ra12S and L985PEx encoded by SEQ ID NO:1879.

[0951] SEQ ID NO:1881 is the predicted cDNA sequence the extracellular loop 2 peptide of L985P.

[0952] SEQ ID NO:1882 is the predicted amino acid sequence for the extracellular loop 2 peptide of L985P encoded by SEQ ID NO:1875.

[0953] SEQ ID NO:1883 is an extended cDNA sequence for clone #59316 (SEQ ID NO:1180; L1428P).

[0954] SEQ ID NO:1884 is a first predicted amino acid sequence encoded by SEQ ID NO:1883 and designated L1428P-ORF1.

[0955] SEQ ID NO:1885 is a second predicted amino acid sequence encoded by SEQ ID NO:1883 and designated L1428P-ORF2.

[0956] SEQ ID NO:1886 is a third predicted amino acid sequence encoded by SEQ ID NO:1883 and designated L1428P-ORF3.

[0957] SEQ ID NO:1887 is a fourth predicted amino acid sequence encoded by SEQ ID NO:1883 and designated L1428P-ORF4.

[0958] SEQ ID NO:1888 is a fifth predicted amino acid sequence encoded by SEQ ID NO:1883 and designated L1428P-ORF5.

[0959] SEQ ID NO:1889 is a sixth predicted amino acid sequence encoded by SEQ ID NO:1883 and designated L1428P-ORF6.

[0960] SEQ ID NO:1890 is a seventh predicted amino acid sequence encoded by SEQ ID NO:1883 and designated L1428P-ORF7.

[0961] SEQ ID NO:1891-1900 are the nucleotide sequences for the database hits described in Table 17.

[0962] SEQ ID NO:1901-1909 are the deduced amino acid sequences encoded by the nucleotide sequences described in Table 17.

[0963] SEQ ID NO:1910 is the full-length cDNA for clone L1437P (partial sequence given in SEQ ID NO:1896).

[0964] SEQ ID NO:1911 is the forward primer PDM-433 for the coding region of clone L548S.

[0965] SEQ ID NO:1912 is the reverse primer PDM-438 for the coding region of clone L548S.

[0966] SEQ ID NO:1913 is the amino acid sequence for the expressed recombinant L548S.

[0967] SEQ ID NO:1914 is the DNA coding sequence for the recombinant L548S.

[0968] SEQ ID NO:1915 is the forward primer PDM-498 for the coding region of clone L551S

[0969] SEQ ID NO:1916 is the reverse primer PDM-499 for the coding region of clone L551S

[0970] SEQ ID NO:1917 is the amino acid sequence for the expressed recombinant L551S.

[0971] SEQ ID NO:1918 is the DNA coding sequence for the recombinant L551S.

[0972] SEQ ID NO:1919 is the forward primer PDM-479 for the coding region of clone L552S

[0973] SEQ ID NO:1920 is the reverse primer PDM-480 for the coding region of clone L552S

[0974] SEQ ID NO:1921 is the amino acid sequence for the expressed recombinant L552S.

[0975] SEQ ID NO:1922 is the DNA coding sequence for the recombinant L552S.

[0976] SEQ ID NO:1923 is the predicted full-length cDNA sequence for clone #19069 (partial sequence given in SEQ ID NO:90).

[0977] SEQ ID NO:1924 is the predicted full-length cDNA sequence for clone #18965 or #19002 (partial sequence given in SEQ ID NO:15).

[0978] SEQ ID NO:1925 is the deduced amino acid sequence encoded by SEQ ID NO:1923.

[0979] SEQ ID NO:1926 is the deduced amino acid sequence encoded by SEQ ID NO:1924.

[0980] SEQ ID NO:1927 is the determined amino acid sequence of a first L552S epitope.

[0981] SEQ ID NO:1928 is the determined amino acid sequence of a second L552S epitope.

[0982] SEQ ID NO:1929 is the determined amino acid sequence of a third L552S epitope.

[0983] SEQ ID NO:1930 is the amino acid sequence for L985P peptide #3482.

[0984] SEQ ID NO:1931 is an extended cDNA sequence for clone #61144 (SEQ ID NO:1761, L1439P).

[0985] SEQ ID NO:1932 is the deduced amino acid sequence encoded by SEQ ID NO:1931.

[0986] SEQ ID NO:1933 is the full-length cDNA of the NUF2R gene to which SEQ ID NO:1931 shows some sequence similarity.

[0987] SEQ ID NO:1934 is the deduced amino acid sequence encoded by SEQ ID NO:1933.

[0988] SEQ ID NO:1935 is a forward primer PDM-737 for the coding region of clone L552S.

[0989] SEQ ID NO:1936 is a reverse primer PDM-738 for the coding region of clone L552S.

[0990] SEQ ID NO:1937 is the amino acid sequence for the expressed recombinant L552S.

[0991] SEQ ID NO:1938 is the DNA coding sequence for the recombinant L552S.

[0992] SEQ ID NO:1939 is another forward primer PDM-736 for the coding region of clone L552S.

[0993] SEQ ID NO:1940 is the amino acid sequence for a second expressed recombinant L552S.

[0994] SEQ ID NO:1941 is the DNA coding sequence for a second recombinant L552S.

[0995] SEQ ID NO:1942 is the determined amino acid sequence of a fourth L552S epitope.

[0996] SEQ ID NO:1943 is the determined amino acid sequence of a first XAGE-1 epitope.

[0997] SEQ ID NO:1944 is the determined amino acid sequence of a second XAGE-1 epitope.

[0998] SEQ ID NO:1945 is the determined amino acid sequence of a first 20-mer peptide corresponding to amino acid residues 1-20 of full-length L552S (SEQ ID NO:809).

[0999] SEQ ID NO:1946 is the determined amino acid sequence of a second 20-mer peptide corresponding to amino acid residues 6-25 of full-length L552S (SEQ ID NO:809).

[1000] SEQ ID NO:1947 is the determined amino acid sequence of a third 20-mer peptide corresponding to amino acid residues 11-30 of full-length L552S (SEQ ID NO:809).

[1001] SEQ ID NO:1948 is the determined amino acid sequence of a fourth 20-mer peptide corresponding to amino acid residues 16-35 of full-length L552S (SEQ ID NO:809).

[1002] SEQ ID NO:1949 is the determined amino acid sequence of a fifth 20-mer peptide corresponding to amino acid residues 21-40 of full-length L552S (SEQ ID NO:809).

[1003] SEQ ID NO:1950 is the determined amino acid sequence of a sixth 20-mer peptide corresponding to amino acid residues 26-45 of full-length L552S (SEQ ID NO:809).

[1004] SEQ ID NO:1951 is the determined amino acid sequence of a seventh 20-mer peptide corresponding to amino acid residues 31-50 of full-length L552S (SEQ ID NO:809).

[1005] SEQ ID NO:1952 is the determined amino acid sequence of a eigth 20-mer peptide corresponding to amino acid residues 36-55 of full-length L552S (SEQ ID NO:809).

[1006] SEQ ID NO:1953 is the determined amino acid sequence of a ninth 20-mer peptide corresponding to amino acid residues 41-60 of full-length L552S (SEQ ID NO:809).

[1007] SEQ ID NO:1954 is the determined amino acid sequence of a tenth 20-mer peptide corresponding to amino acid residues 46-65 of full-length L552S (SEQ ID NO:809).

[1008] SEQ ID NO:1955 is the determined amino acid sequence of a eleventh 20-mer peptide corresponding to amino acid residues 51-70 of full-length L552S (SEQ ID NO:809).

[1009] SEQ ID NO:1955 is the determined amino acid sequence of a twelveth 20-mer peptide corresponding to amino acid residues 56-75 of full-length L552S (SEQ ID NO:809).

[1010] SEQ ID NO:1956 is the determined amino acid sequence of a thirth 20-mer peptide corresponding to amino acid residues 61-80 of full-length L552S (SEQ ID NO:809).

[1011] SEQ ID NO:1957 is the determined amino acid sequence of a fourteenth 20-mer peptide corresponding to amino acid residues 66-85 of full-length L552S (SEQ ID NO:809).

[1012] SEQ ID NO:1958 is the determined amino acid sequence of a fifteenth 20-mer peptide corresponding to amino acid residues 71-90 of full-length L552S (SEQ ID NO:809).

[1013] SEQ ID NO:1959 is the determined amino acid sequence of a sixteenth 20-mer peptide corresponding to amino acid residues 76-95 of full-length L552S (SEQ ID NO:809).

[1014] SEQ ID NO:1961 is the determined amino acid sequence of a seventeen 20-mer peptide corresponding to amino acid residues 81-100 of full-length L552S (SEQ ID NO:809).

[1015] SEQ ID NO:1962 is the determined amino acid sequence of a eighthth 20-mer peptide corresponding to amino acid residues 86-105 of full-length L552S (SEQ ID NO:809).

[1016] SEQ ID NO:1963 is the determined amino acid sequence of a nineteenth 20-mer peptide corresponding to amino acid residues 91-110 of full-length L552S (SEQ ID NO:809).

[1017] SEQ ID NO:1964 is the determined amino acid sequence of a twentieth 20-mer peptide corresponding to amino acid residues 96-115 of full-length L552S (SEQ ID NO:809).

[1018] SEQ ID NO:1965 is the determined amino acid sequence of a twenty-first 20-mer peptide corresponding to amino acid residues 101-120 of full-length L552S (SEQ ID NO:809).

[1019] SEQ ID NO:1966 is the determined amino acid sequence of a twenty-second 20-mer peptide corresponding to amino acid residues 106-125 of full-length L552S (SEQ ID NO:809).

[1020] SEQ ID NO:1967 is the determined amino acid sequence of a twenty-third 20-mer peptide corresponding to amino acid residues 111-130 of full-length L552S (SEQ ID NO:809).

[1021] SEQ ID NO:1968 is the determined amino acid sequence of a twenty-fourth 20-mer peptide corresponding to amino acid residues 116-135 of full-length L552S (SEQ ID NO:809).

[1022] SEQ ID NO:1969 is the determined amino acid sequence of a twenty-fifth 20-mer peptide corresponding to amino acid residues 121-140 of full-length L552S (SEQ ID NO:809).

[1023] SEQ ID NO:1970 is the determined amino acid sequence of a twenty-sixth 20-mer peptide corresponding to amino acid residues 126-145 of full-length L552S (SEQ ID NO:809).

[1024] SEQ ID NO:1971 is the determined amino acid sequence of a twenth-seventh 20-mer peptide corresponding to amino acid residues 131-150 of full-length L552S (SEQ ID NO:809).

[1025] SEQ ID NO:1972 is the determined amino acid sequence of a twenty-eigth 20-mer peptide corresponding to amino acid residues 136-155 of full-length L552S (SEQ ID NO:809).

[1026] SEQ ID NO:1973 is the determined amino acid sequence of a twenty-ninth 20-mer peptide corresponding to amino acid residues 141-160 of full-length L552S (SEQ ID NO:809).

[1027] SEQ ID NO:1974 is the DNA sequence which encodes the 20-mer of SEQ ID NO:1945.

[1028] SEQ ID NO:1975 is the DNA sequence which encodes the 20-mer of SEQ ID NO:1946.

[1029] SEQ ID NO:1976 is the DNA sequence which encodes the 20-mer of SEQ ID NO:1947.

[1030] SEQ ID NO:1977 is the DNA sequence which encodes the 20-mer of SEQ ID NO:1948.

[1031] SEQ ID NO:1978 is the DNA sequence which encodes the 20-mer of SEQ ID NO:1949.

[1032] SEQ ID NO:1979 is the DNA sequence which encodes the 20-mer of SEQ ID NO:1950.

[1033] SEQ ID NO:1980 is the DNA sequence which encodes the 20-mer of SEQ ID NO:1951.

[1034] SEQ ID NO:1981 is the DNA sequence which encodes the 20-mer of SEQ ID NO:1952.

[1035] SEQ ID NO:1982 is the DNA sequence which encodes the 20-mer of SEQ ID NO:1953.

[1036] SEQ ID NO:1983 is the DNA sequence which encodes the 20-mer of SEQ ID NO:1954.

[1037] SEQ ID NO:1984 is the DNA sequence which encodes the 20-mer of SEQ ID NO:1955.

[1038] SEQ ID NO:1985 is the DNA sequence which encodes the 20-mer of SEQ ID NO:1956.

[1039] SEQ ID NO:1986 is the DNA sequence which encodes the 20-mer of SEQ ID NO:1957.

[1040] SEQ ID NO:1987 is the DNA sequence which encodes the 20-mer of SEQ ID NO:1958.

[1041] SEQ ID NO:1988 is the DNA sequence which encodes the 20-mer of SEQ ID NO:1959.

[1042] SEQ ID NO:1989 is the DNA sequence which encodes the 20-mer of SEQ ID NO:1960.

[1043] SEQ ID NO:1990 is the DNA sequence which encodes the 20-mer of SEQ ID NO:1961.

[1044] SEQ ID NO:1991 is the DNA sequence which encodes the 20-mer of SEQ ID NO:1962.

[1045] SEQ ID NO:1992 is the DNA sequence which encodes the 20-mer of SEQ ID NO:1963.

[1046] SEQ ID NO:1993 is the DNA sequence which encodes the 20-mer of SEQ ID NO:1964.

[1047] SEQ ID NO:1994 is the DNA sequence which encodes the 20-mer of SEQ ID NO:1965.

[1048] SEQ ID NO:1995 is the DNA sequence which encodes the 20-mer of SEQ ID NO:1966.

[1049] SEQ ID NO:1996 is the DNA sequence which encodes the 20-mer of SEQ ID NO:1967.

[1050] SEQ ID NO:1997 is the DNA sequence which encodes the 20-mer of SEQ ID NO:1968.

[1051] SEQ ID NO:1998 is the DNA sequence which encodes the 20-mer of SEQ ID NO:1969.

[1052] SEQ ID NO:1999 is the DNA sequence which encodes the 20-mer of SEQ ID NO:1970.

[1053] SEQ ID NO:2000 is the DNA sequence which encodes the 20-mer of SEQ ID NO:1971.

[1054] SEQ ID NO:2001 is the DNA sequence which encodes the 20-mer of SEQ ID NO:1972.

[1055] SEQ ID NO:2002 is the DNA sequence which encodes the 20-mer of SEQ ID NO:1973.

[1056] SEQ ID NO:2003 is the DNA sequence which encodes the full-length L985P Gly 119.

[1057] SEQ ID NO:2004 is the predicted protein sequence of full-length L985P Gly 119, encoded by SEQ ID NO:2003.

[1058] SEQ ID NO:2005 is the amino acid sequence of the 20-mer peptide #20 of full-length L552S (SEQ ID NO:809).

[1059] SEQ ID NO:2006 is the amino acid sequence of the overlapping peptides #4-#6 of full-length L552S (SEQ ID NO:809).

[1060] SEQ ID NO:2007 is the amino acid sequence of the overlapping peptides #16-#18 of full-length L552S (SEQ ID NO:809).

[1061] SEQ ID NO:2008 is the amino acid sequence of the overlapping peptides #22-#24 of full-length L552S (SEQ ID NO:809).

[1062] SEQ ID NO:2009 is the amino acid sequence of the overlapping peptides #25-#27 of full-length L552S (SEQ ID NO:809).

[1063] SEQ ID NO:2010 is the amino acid sequence of the peptide epitope of L984P recognized by donor D223 (overlapping peptide #17 of L984P).

[1064] SEQ ID NO:2011 is the amino acid sequence of the peptide epitope of L984P recognized by donor D336 (overlapping peptide #3 of L984P).

### DETAILED DESCRIPTION OF THE INVENTION

[1065] The present invention is directed generally to compositions and their use in the therapy and diagnosis of cancer, particularly lung cancer. As described further below, illustrative compositions of the present invention include, but are not restricted to, polypeptides, particularly immunogenic polypeptides, polynucleotides encoding such polypeptides, antibodies and other binding agents, antigen presenting cells (APCs) and immune system cells (e.g., T cells).

[1066] The practice of the present invention will employ, unless indicated specifically to the contrary, conventional methods of virology, immunology, microbiology, molecular biology and recombinant DNA techniques within the skill of the art, many of which are described below for the purpose of illustration. Such techniques are explained fully in the literature. See, e.g., Sambrook, et al. Molecular Cloning: A Laboratory Manual (2nd Edition, 1989); Maniatis et al. Molecular Cloning: A Laboratory Manual (1982); DNA Cloning: A Practical Approach, vol. I & II (D. Glover, ed.); Oligonucleotide Synthesis (N. Gait, ed., 1984); Nucleic Acid Hybridization (B. Hames & S. Higgins, eds., 1985); Transcription and Translation (B. Hames & S. Higgins, eds., 1984); Animal Cell Culture (R. Freshney, ed., 1986); Perbal, A Practical Guide to Molecular Cloning (1984).

[1067] All publications, patents and patent applications cited herein, whether supra or infra, are hereby incorporated by reference in their entirety.

[1068] As used in this specification and the appended claims, the singular forms “a,” “an” and “the” include plural references unless the content clearly dictates otherwise.

[1069] Polypeptide Compositions

[1070] As used herein, the term “polypeptide”” is used in its conventional meaning, i.e., as a sequence of amino acids. The polypeptides are not limited to a specific length of the product; thus, peptides, oligopeptides, and proteins are included within the definition of polypeptide, and such terms may be used interchangeably herein unless specifically indicated otherwise. This term also does not refer to or exclude post-expression modifications of the polypeptide, for example, glycosylations, acetylations, phosphorylations and the like, as well as other modifications known in the art, both naturally occurring and non-naturally occurring. A polypeptide may be an entire protein, or a subsequence thereof. Particular polypeptides of interest in the context of this invention are amino acid subsequences comprising epitopes, i.e., antigenic determinants substantially responsible for the immunogenic properties of a polypeptide and being capable of evoking an immune response.

[1071] Particularly illustrative polypeptides of the present invention comprise those encoded by a polynucleotide sequence set forth in any one of SEQ ID NO:1-323, 341-782, 784-785, 788, 790, 792, 794, 796, 800-804, 807, 808, 810-826, 828-1664, 1668, 1669, 1676, 1680-1805, 1823, 1824, 1826-1829, 1861, 1862, 1865-1868, 1873, 1875, 1877, 1879, 1881, 1883, 1891-1900, 1910, 1914, 1918, 1922-1924, 1931, 1933, 1938, 1941, 1974-2002, and 2003, or a sequence that hybridizes under moderately stringent conditions, or, alternatively, under highly stringent conditions, to a polynucleotide sequence set forth in any one of SEQ ID NO:1-323, 341-782, 784-785, 788, 790, 792, 794, 796, 800-804, 807, 808, 810-826, 828-1664, 1668, 1669, 1676, 1680-1805, 1823, 1824, 1826-1829, 1861, 1862, 1865-1868, 1873, 1875, 1877, 1879, 1881, 1883, 1891-1900, 1910, 1914, 1918, 1922-1924, 1931, 1933, 1938, 1941, 1974-2002, and 2003. Certain other illustrative polypeptides of the invention comprise amino acid sequences as set forth in any one of SEQ ID NO:324-340, 786, 787, 789, 791, 793, 795, 797-799, 805, 806, 809, 827, 1667, 1670-1675, 1677-1679, 1806-1822, 1825, 1830-1833, 1834-1856, 1863, 1864, 1869-1872, 1874, 1876, 1878, 1880, 1882, 1884-1890, 1901-1909, 1913, 1917, 1921, 1925-1930, 1932, 1934, 1937, 1940, 1942-1973, 2004, and 2005-2011.

[1072] The polypeptides of the present invention are sometimes herein referred to as lung tumor proteins or lung tumor polypeptides, as an indication that their identification has been based at least in part upon their increased levels of expression in lung tumor samples. Thus, a “lung tumor polypeptide” or “lung tumor protein,” refers generally to a polypeptide sequence of the present invention, or a polynucleotide sequence encoding such a polypeptide, that is expressed in a substantial proportion of lung tumor samples, for example preferably greater than about 20%, more preferably greater than about 30%, and most preferably greater than about 50% or more of lung tumor samples tested, at a level that is at least two fold, and preferably at least five fold, greater than the level of expression in normal tissues, as determined using a representative assay provided herein. A lung tumor polypeptide sequence of the invention, based upon its increased level of expression in tumor cells, has particular utility both as a diagnostic marker as well as a therapeutic target, as further described below.

[1073] In certain preferred embodiments, the polypeptides of the invention are immunogenic, i.e., they react detectably within an immunoassay (such as an ELISA or T-cell stimulation assay) with antisera and/or T-cells from a patient with lung cancer. Screening for immunogenic activity can be performed using techniques well known to the skilled artisan. For example, such screens can be performed using methods such as those described in Harlow and Lane, Antibodies: A Laboratory Manual, Cold Spring Harbor Laboratory, 1988. In one illustrative example, a polypeptide may be immobilized on a solid support and contacted with patient sera to allow binding of antibodies within the sera to the immobilized polypeptide. Unbound sera may then be removed and bound antibodies detected using, for example, ¹²⁵I-labeled Protein A.

[1074] As would be recognized by the skilled artisan, immunogenic portions of the polypeptides disclosed herein are also encompassed by the present invention. An “immunogenic portion,” as used herein, is a fragment of an immunogenic polypeptide of the invention that itself is immunologically reactive (i.e., specifically binds) with the B-cells and/or T-cell surface antigen receptors that recognize the polypeptide. Immunogenic portions may generally be identified using well known techniques, such as those summarized in Paul, Fundamental Immunology, 3rd ed., 243-247 (Raven Press, 1993) and references cited therein. Such techniques include screening polypeptides for the ability to react with antigen-specific antibodies, antisera and/or T-cell lines or clones. As used herein, antisera and antibodies are “antigen-specific” if they specifically bind to an antigen (i.e., they react with the protein in an ELISA or other immunoassay, and do not react detectably with unrelated proteins). Such antisera and antibodies may be prepared as described herein, and using well-known techniques.

[1075] In one preferred embodiment, an immunogenic portion of a polypeptide of the present invention is a portion that reacts with antisera and/or T-cells at a level that is not substantially less than the reactivity of the full-length polypeptide (e.g., in an ELISA and/or T-cell reactivity assay). Preferably, the level of immunogenic activity of the immunogenic portion is at least about 50%, preferably at least about 70% and most preferably greater than about 90% of the immunogenicity for the full-length polypeptide. In some instances, preferred immunogenic portions will be identified that have a level of immunogenic activity greater than that of the corresponding full-length polypeptide, e.g., having greater than about 100% or 150% or more immunogenic activity.

[1076] In certain other embodiments, illustrative immunogenic portions may include peptides in which an N-terminal leader sequence and/or transmembrane domain have been deleted. Other illustrative immunogenic portions will contain a small N- and/or C-terminal deletion (e.g., 1-30 amino acids, preferably 5-15 amino acids), relative to the mature protein.

[1077] In another embodiment, a polypeptide composition of the invention may also comprise one or more polypeptides that are immunologically reactive with T cells and/or antibodies generated against a polypeptide of the invention, particularly a polypeptide having an amino acid sequence disclosed herein, or to an immunogenic fragment or variant thereof.

[1078] In another embodiment of the invention, polypeptides are provided that comprise one or more polypeptides that are capable of eliciting T cells and/or antibodies that are immunologically reactive with one or more polypeptides described herein, or one or more polypeptides encoded by contiguous nucleic acid sequences contained in the polynucleotide sequences disclosed herein, or immunogenic fragments or variants thereof, or to one or more nucleic acid sequences which hybridize to one or more of these sequences under conditions of moderate to high stringency.

[1079] The present invention, in another aspect, provides polypeptide fragments comprising at least about 5, 10, 15, 20, 25, 50, or 100 contiguous amino acids, or more, including all intermediate lengths, of a polypeptide compositions set forth herein, such as those set forth in SEQ ID NO:324-340, 786, 787, 789, 791, 793, 795, 797-799, 805, 806, 809, 827, 1667, 1670-1675, 1677-1679, 1806-1822, 1825, 1830-1833, 1834-1856, 1863, 1864, 1869-1872, 1874, 1876, 1878, 1880, 1882, 1884-1890, 1901-1909, 1913, 1917, 1921, 1925-1930, 1932, 1934, 1937, 1940, 1942-1973, 2004, and 2005-2011, or those encoded by a polynucleotide sequence set forth in a sequence of SEQ ID NO:1-323, 341-782, 784-785, 788, 790, 792, 794, 796, 800-804, 807, 808, 810-826, 828-1664, 1668, 1669, 1676, 1680-1805, 1823, 1824, 1826-1829, 1861, 1862, 1865-1868, 1873, 1875, 1877, 1879, 1881, 1883, 1891-1900, 1910, 1914, 1918, 1922-1924, 1931, 1933, 1938, 1941, 1974-2002, and 2003.

[1080] In another aspect, the present invention provides variants of the polypeptide compositions described herein. Polypeptide variants generally encompassed by the present invention will typically exhibit at least about 70%, 75%, 80%, 85%, 90%, 91%, 92%, 93%, 94%, 95%, 96%, 97%, 98%, or 99% or more identity (determined as described below), along its length, to a polypeptide sequences set forth herein.

[1081] In one preferred embodiment, the polypeptide fragments and variants provide by the present invention are immunologically reactive with an antibody and/or T-cell that reacts with a full-length polypeptide specifically set for the herein.

[1082] In another preferred embodiment, the polypeptide fragments and variants provided by the present invention exhibit a level of immunogenic activity of at least about 50%, preferably at least about 70%, and most preferably at least about 90% or more of that exhibited by a full-length polypeptide sequence specifically set forth herein.

[1083] A polypeptide “variant,” as the term is used herein, is a polypeptide that typically differs from a polypeptide specifically disclosed herein in one or more substitutions, deletions, additions and/or insertions. Such variants may be naturally occurring or may be synthetically generated, for example, by modifying one or more of the above polypeptide sequences of the invention and evaluating their immunogenic activity as described herein and/or using any of a number of techniques well known in the art.

[1084] For example, certain illustrative variants of the polypeptides of the invention include those in which one or more portions, such as an N-terminal leader sequence or transmembrane domain, have been removed. Other illustrative variants include variants in which a small portion (e.g., 1-30 amino acids, preferably 5-15 amino acids) has been removed from the N- and/or C-terminal of the mature protein.

[1085] In many instances, a variant will contain conservative substitutions. A “conservative substitution” is one in which an amino acid is substituted for another amino acid that has similar properties, such that one skilled in the art of peptide chemistry would expect the secondary structure and hydropathic nature of the polypeptide to be substantially unchanged. As described above, modifications may be made in the structure of the polynucleotides and polypeptides of the present invention and still obtain a functional molecule that encodes a variant or derivative polypeptide with desirable characteristics, e.g., with immunogenic characteristics. When it is desired to alter the amino acid sequence of a polypeptide to create an equivalent, or even an improved, immunogenic variant or portion of a polypeptide of the invention, one skilled in the art will typically change one or more of the codons of the encoding DNA sequence according to Table 10.

[1086] For example, certain amino acids may be substituted for other amino acids in a protein structure without appreciable loss of interactive binding capacity with structures such as, for example, antigen-binding regions of antibodies or binding sites on substrate molecules. Since it is the interactive capacity and nature of a protein that defines that protein's biological functional activity, certain amino acid sequence substitutions can be made in a protein sequence, and, of course, its underlying DNA coding sequence, and nevertheless obtain a protein with like properties. It is thus contemplated that various changes may be made in the peptide sequences of the disclosed compositions, or corresponding DNA sequences which encode said peptides without appreciable loss of their biological utility or activity.

TABLE 10C

| Amino Acids | | | Codons |
|---|---|---|---|
| Alanine | Ala | A | GCA GCC GCG GCU |
| Cysteine | Cys | C | UGC UGU |
| Aspartic acid | Asp | D | GAC GAU |
| Glutamic acid | Glu | E | GAA GAG |
| Phenylalanine | Phe | F | UUC UUU |
| Glycine | Gly | G | GGA GGC GGG GGU |
| Histidine | His | H | CAC CAU |
| Isoleucine | Ile | I | AUA AUC AUU |
| Lysine | Lys | K | AAA AAG |
| Leucine | Leu | L | UUA UUG CUA CUC CUG CUU |
| Methionine | Met | M | AUG |
| Asparagine | Asn | N | AAC AAU |
| Proline | Pro | P | CCA CCC CCG CCU |
| Glutamine | Gln | Q | CAA CAG |
| Arginine | Arg | R | AGA AGG CGA CGC CGG CGU |
| Serine | Ser | S | AGC AGU UCA UCC UCG UCU |
| Threonine | Thr | T | ACA ACC ACG ACU |
| Valine | Val | V | GUA GUC GUG GUU |
| Tryptophan | Trp | W | UGG |
| Tyrosine | Tyr | Y | UAC UAU |

[1087] In making such changes, the hydropathic index of amino acids may be considered. The importance of the hydropathic amino acid index in conferring interactive biologic function on a protein is generally understood in the art (Kyte and Doolittle, 1982, incorporated herein by reference). It is accepted that the relative hydropathic character of the amino acid contributes to the secondary structure of the resultant protein, which in turn defines the interaction of the protein with other molecules, for example, enzymes, substrates, receptors, DNA, antibodies, antigens, and the like. Each amino acid has been assigned a hydropathic index on the basis of its hydrophobicity and charge characteristics (Kyte and Doolittle, 1982). These values are: isoleucine (+4.5); valine (+4.2); leucine (+3.8); phenylalanine (+2.8); cysteine/cystine (+2.5); methionine (+1.9); alanine (+1.8); glycine (−0.4); threonine (−0.7); serine (−0.8); tryptophan (−0.9); tyrosine (−1.3); proline (−1.6); histidine (−3.2); glutamate (−3.5); glutamine (−3.5); aspartate (−3.5); asparagine (−3.5); lysine (−3.9); and arginine (−4.5).

[1088] It is known in the art that certain amino acids may be substituted by other amino acids having a similar hydropathic index or score and still result in a protein with similar biological activity, i.e. still obtain a biological functionally equivalent protein. In making such changes, the substitution of amino acids whose hydropathic indices are within ±2 is preferred, those within ±1 are particularly preferred, and those within ±0.5 are even more particularly preferred. It is also understood in the art that the substitution of like amino acids can be made effectively on the basis of hydrophilicity. U.S. Pat. No. 4,554,101 (specifically incorporated herein by reference in its entirety), states that the greatest local average hydrophilicity of a protein, as governed by the hydrophilicity of its adjacent amino acids, correlates with a biological property of the protein.

[1089] As detailed in U.S. Pat. No. 4,554,101, the following hydrophilicity values have been assigned to amino acid residues: arginine (+3.0); lysine (+3.0); aspartate (+3.0±1); glutamate (+3.0±1); serine (+0.3); asparagine (+0.2); glutamine (+0.2); glycine (0); threonine (−0.4); proline (−0.5±1); alanine (−0.5); histidine (−0.5); cysteine (−1.0); methionine (−1.3); valine (−1.5); leucine (−1.8); isoleucine (−1.8); tyrosine (−2.3); phenylalanine (−2.5); tryptophan (−3.4). It is understood that an amino acid can be substituted for another having a similar hydrophilicity value and still obtain a biologically equivalent, and in particular, an immunologically equivalent protein. In such changes, the substitution of amino acids whose hydrophilicity values are within ±2 is preferred, those within ±1 are particularly preferred, and those within ±0.5 are even more particularly preferred.

[1090] As outlined above, amino acid substitutions are generally therefore based on the relative similarity of the amino acid side-chain substituents, for example, their hydrophobicity, hydrophilicity, charge, size, and the like. Exemplary substitutions that take various of the foregoing characteristics into consideration are well known to those of skill in the art and include: arginine and lysine; glutamate and aspartate; serine and threonine; glutamine and asparagine; and valine, leucine and isoleucine.

[1091] In addition, any polynucleotide may be further modified to increase stability in vivo. Possible modifications include, but are not limited to, the addition of flanking sequences at the 5′ and/or 3′ ends; the use of phosphorothioate or 2′ O-methyl rather than phosphodiesterase linkages in the backbone; and/or the inclusion of nontraditional bases such as inosine, queosine and wybutosine, as well as acetyl-methyl-, thio- and other modified forms of adenine, cytidine, guanine, thymine and uridine.

[1092] Amino acid substitutions may further be made on the basis of similarity in polarity, charge, solubility, hydrophobicity, hydrophilicity and/or the amphipathic nature of the residues. For example, negatively charged amino acids include aspartic acid and glutamic acid; positively charged amino acids include lysine and arginine; and amino acids with uncharged polar head groups having similar hydrophilicity values include leucine, isoleucine and valine; glycine and alanine; asparagine and glutamine; and serine, threonine, phenylalanine and tyrosine. Other groups of amino acids that may represent conservative changes include: (1) ala, pro, gly, glu, asp, gin, asn, ser, thr; (2) cys, ser, tyr, thr; (3) val, ile, leu, met, ala, phe; (4) lys, arg, his; and (5) phe, tyr, trp, his. A variant may also, or alternatively, contain nonconservative changes. In a preferred embodiment, variant polypeptides differ from a native sequence by substitution, deletion or addition of five amino acids or fewer. Variants may also (or alternatively) be modified by, for example, the deletion or addition of amino acids that have minimal influence on the immunogenicity, secondary structure and hydropathic nature of the polypeptide.

[1093] As noted above, polypeptides may comprise a signal (or leader) sequence at the N-terminal end of the protein, which co-translationally or post-translationally directs transfer of the protein. The polypeptide may also be conjugated to a linker or other sequence for ease of synthesis, purification or identification of the polypeptide (e.g., poly-His), or to enhance binding of the polypeptide to a solid support. For example, a polypeptide may be conjugated to an immunoglobulin Fc region.

[1094] When comparing polypeptide sequences, two sequences are said to be “identical” if the sequence of amino acids in the two sequences is the same when aligned for maximum correspondence, as described below. Comparisons between two sequences are typically performed by comparing the sequences over a comparison window to identify and compare local regions of sequence similarity. A “comparison window” as used herein, refers to a segment of at least about 20 contiguous positions, usually 30 to about 75, 40 to about 50, in which a sequence may be compared to a reference sequence of the same number of contiguous positions after the two sequences are optimally aligned.

[1095] Optimal alignment of sequences for comparison may be conducted using the Megalign program in the Lasergene suite of bioinformatics software (DNASTAR, Inc., Madison, Wis.), using default parameters. This program embodies several alignment schemes described in the following references: Dayhoff, M. O. (1978) A model of evolutionary change in proteins—Matrices for detecting distant relationships. In Dayhoff, M. O. (ed.) Atlas of Protein Sequence and Structure, National Biomedical Research Foundation, Washington D.C. Vol. 5, Suppl. 3, pp. 345-358; Hein J. (1990) Unified Approach to Alignment and Phylogenes pp. 626-645 Methods in Enzymology vol. 183, Academic Press, Inc., San Diego, Calif.; Higgins, D. G. and Sharp, P. M. (1989) CABIOS 5:151-153; Myers, E. W. and Muller W. (1988) CABIOS 4:11-17; Robinson, E. D. (1971) Comb. Theor 11:105; Santou, N. Nes, M. (1987) Mol. Biol. Evol. 4:406-425; Sneath, P. H. A. and Sokal, R. R. (1973) Numerical Taxonomy—the Principles and Practice of Numerical Taxonomy, Freeman Press, San Francisco, Calif.; Wilbur, W. J. and Lipman, D. J. (1983) Proc. Natl. Acad., Sci. USA 80:726-730.

[1096] Alternatively, optimal alignment of sequences for comparison may be conducted by the local identity algorithm of Smith and Waterman (1981) Add. APL. Math 2:482, by the identity alignment algorithm of Needleman and Wunsch (1970) J. Mol. Biol. 48:443, by the search for similarity methods of Pearson and Lipman (1988) Proc. Natl. Acad. Sci. USA 85: 2444, by computerized implementations of these algorithms (GAP, BESTFIT, BLAST, FASTA, and TFASTA in the Wisconsin Genetics Software Package, Genetics Computer Group (GCG), 575 Science Dr., Madison, Wis.), or by inspection.

[1097] One preferred example of algorithms that are suitable for determining percent sequence identity and sequence similarity are the BLAST and BLAST 2.0 algorithms, which are described in Altschul et al. (1977) Nucl. Acids Res. 25:3389-3402 and Altschul et al. (1990) J. Mol. Biol. 215:403-410, respectively. BLAST and BLAST 2.0 can be used, for example with the parameters described herein, to determine percent sequence identity for the polynucleotides and polypeptides of the invention. Software for performing BLAST analyses is publicly available through the National Center for Biotechnology Information. For amino acid sequences, a scoring matrix can be used to calculate the cumulative score. Extension of the word hits in each direction are halted when: the cumulative alignment score falls off by the quantity X from its maximum achieved value; the cumulative score goes to zero or below, due to the accumulation of one or more negative-scoring residue alignments; or the end of either sequence is reached. The BLAST algorithm parameters W, T and X determine the sensitivity and speed of the alignment.

[1098] In one preferred approach, the “percentage of sequence identity” is determined by comparing two optimally aligned sequences over a window of comparison of at least 20 positions, wherein the portion of the polypeptide sequence in the comparison window may comprise additions or deletions (i.e., gaps) of 20 percent or less, usually 5 to 15 percent, or 10 to 12 percent, as compared to the reference sequences (which does not comprise additions or deletions) for optimal alignment of the two sequences. The percentage is calculated by determining the number of positions at which the identical amino acid residue occurs in both sequences to yield the number of matched positions, dividing the number of matched positions by the total number of positions in the reference sequence (i.e., the window size) and multiplying the results by 100 to yield the percentage of sequence identity.

[1099] Within other illustrative embodiments, a polypeptide may be a fusion polypeptide that comprises multiple polypeptides as described herein, or that comprises at least one polypeptide as described herein and an unrelated sequence, such as a known tumor protein. A fusion partner may, for example, assist in providing T helper epitopes (an immunological fusion partner), preferably T helper epitopes recognized by humans, or may assist in expressing the protein (an expression enhancer) at higher yields than the native recombinant protein. Certain preferred fusion partners are both immunological and expression enhancing fusion partners. Other fusion partners may be selected so as to increase the solubility of the polypeptide or to enable the polypeptide to be targeted to desired intracellular compartments. Still further fusion partners include affinity tags, which facilitate purification of the polypeptide.

[1100] Fusion polypeptides may generally be prepared using standard techniques, including chemical conjugation. Preferably, a fusion polypeptide is expressed as a recombinant polypeptide, allowing the production of increased levels, relative to a non-fused polypeptide, in an expression system. Briefly, DNA sequences encoding the polypeptide components may be assembled separately, and ligated into an appropriate expression vector. The 3′ end of the DNA sequence encoding one polypeptide component is ligated, with or without a peptide linker, to the 5′ end of a DNA sequence encoding the second polypeptide component so that the reading frames of the sequences are in phase. This permits translation into a single fusion polypeptide that retains the biological activity of both component polypeptides.

[1101] A peptide linker sequence may be employed to separate the first and second polypeptide components by a distance sufficient to ensure that each polypeptide folds into its secondary and tertiary structures. Such a peptide linker sequence is incorporated into the fusion polypeptide using standard techniques well known in the art. Suitable peptide linker sequences may be chosen based on the following factors: (1) their ability to adopt a flexible extended conformation; (2) their inability to adopt a secondary structure that could interact with functional epitopes on the first and second polypeptides; and (3) the lack of hydrophobic or charged residues that might react with the polypeptide functional epitopes. Preferred peptide linker sequences contain Gly, Asn and Ser residues. Other near neutral amino acids, such as Thr and Ala may also be used in the linker sequence. Amino acid sequences which may be usefully employed as linkers include those disclosed in Maratea et al., Gene 40:39-46, 1985; Murphy et al., Proc. Natl. Acad. Sci. USA 83:8258-8262, 1986; U.S. Pat. No. 4,935,233 and U.S. Pat. No. 4,751,180. The linker sequence may generally be from 1 to about 50 amino acids in length. Linker sequences are not required when the first and second polypeptides have non-essential N-terminal amino acid regions that can be used to separate the functional domains and prevent steric interference.

[1102] The ligated DNA sequences are operably linked to suitable transcriptional or translational regulatory elements. The regulatory elements responsible for expression of DNA are located only 5′ to the DNA sequence encoding the first polypeptides. Similarly, stop codons required to end translation and transcription termination signals are only present 3′ to the DNA sequence encoding the second polypeptide.

[1103] The fusion polypeptide can comprise a polypeptide as described herein together with an unrelated immunogenic protein, such as an immunogenic protein capable of eliciting a recall response. Examples of such proteins include tetanus, tuberculosis and hepatitis proteins (see, for example, Stoute et al. New Engl. J. Med., 336:86-91, 1997).

[1104] In one preferred embodiment, the immunological fusion partner is derived from a Mycobacterium sp., such as a Mycobacterium tuberculosis-derived Ra12 fragment. Ra12 compositions and methods for their use in enhancing the expression and/or immunogenicity of heterologous polynucleotide/polypeptide sequences is described in U.S. Patent Application No. 60/158,585, the disclosure of which is incorporated herein by reference in its entirety. Briefly, Ra12 refers to a polynucleotide region that is a subsequence of a Mycobacterium tuberculosis MTB32A nucleic acid. MTB32A is a serine protease of 32 KD molecular weight encoded by a gene in virulent and avirulent strains of M. tuberculosis. The nucleotide sequence and amino acid sequence of MTB32A have been described (for example, U.S. Patent Application No. 60/158,585; see also, Skeiky et al., Infection and Immun. (1999) 67:3998-4007, incorporated herein by reference). Surprisingly, it was discovered that a 14 KD C-terminal fragment of the MTB32A coding sequence expresses at high levels on its own and remains as a soluble polypeptide throughout the purification process. Moreover, this fragment may enhance the immunogenicity of heterologous antigenic polypeptides with which it is fused. This 14 KD C-terminal fragment is referred to herein as Ra12 and represents a fragment comprising some or all of amino acid residues 192 to 323 of MTB32A.

[1105] Other preferred Ra12 polynucleotides generally comprise at least about 15 consecutive nucleotides, at least about 30 nucleotides, at least about 60 nucleotides, at least about 100 nucleotides, at least about 200 nucleotides, or at least about 300 nucleotides that encode a portion of a Ra12 polypeptide.

[1106] Ra12 polynucleotides may comprise a native sequence (i.e., an endogenous sequence that encodes a Ra12 polypeptide or a portion thereof) or may comprise a variant of such a sequence. Ra12 polynucleotide variants may contain one or more substitutions, additions, deletions and/or insertions such that the biological activity of the encoded fusion polypeptide is not substantially diminished, relative to a fusion polypeptide comprising a native Ra12 polypeptide. Variants preferably exhibit at least about 70% identity, more preferably at least about 80% identity and most preferably at least about 90% identity to a polynucleotide sequence that encodes a native Ra12 polypeptide or a portion thereof.

[1107] Within other preferred embodiments, an immunological fusion partner is derived from protein D, a surface protein of the gram-negative bacterium Haemophilus influenza B (WO 91/18926). Preferably, a protein D derivative comprises approximately the first third of the protein (e.g., the first N-terminal 100-110 amino acids), and a protein D derivative may be lipidated. Within certain preferred embodiments, the first 109 residues of a Lipoprotein D fusion partner is included on the N-terminus to provide the polypeptide with additional exogenous T-cell epitopes and to increase the expression level in E. coli (thus functioning as an expression enhancer). The lipid tail ensures optimal presentation of the antigen to antigen presenting cells. Other fusion partners include the non-structural protein from influenzae virus, NS1 (hemaglutinin). Typically, the N-terminal 81 amino acids are used, although different fragments that include T-helper epitopes may be used.

[1108] In another embodiment, the immunological fusion partner is the protein known as LYTA, or a portion thereof (preferably a C-terminal portion). LYTA is derived from Streptococcus pneumoniae, which synthesizes an N-acetyl-L-alanine amidase known as amidase LYTA (encoded by the LytA gene; Gene 43:265-292, 1986). LYTA is an autolysin that specifically degrades certain bonds in the peptidoglycan backbone. The C-terminal domain of the LYTA protein is responsible for the affinity to the choline or to some choline analogues such as DEAE. This property has been exploited for the development of E. coli C-LYTA expressing plasmids useful for expression of fusion proteins. Purification of hybrid proteins containing the C-LYTA fragment at the amino terminus has been described (see Biotechnology 10:795-798, 1992). Within a preferred embodiment, a repeat portion of LYTA may be incorporated into a fusion polypeptide. A repeat portion is found in the C-terminal region starting at residue 178. A particularly preferred repeat portion incorporates residues 188-305.

[1109] Yet another illustrative embodiment involves fusion polypeptides, and the polynucleotides encoding them, wherein the fusion partner comprises a targeting signal capable of directing a polypeptide to the endosomal/lysosomal compartment, as described in U.S. Pat. No. 5,633,234. An immunogenic polypeptide of the invention, when fused with this targeting signal, will associate more efficiently with MHC class II molecules and thereby provide enhanced in vivo stimulation of CD4⁺ T-cells specific for the polypeptide.

[1110] Polypeptides of the invention are prepared using any of a variety of well known synthetic and/or recombinant techniques, the latter of which are further described below. Polypeptides, portions and other variants generally less than about 150 amino acids can be generated by synthetic means, using techniques well known to those of ordinary skill in the art. In one illustrative example, such polypeptides are synthesized using any of the commercially available solid-phase techniques, such as the Merrifield solid-phase synthesis method, where amino acids are sequentially added to a growing amino acid chain. See Merrifield, J. Am. Chem. Soc. 85:2149-2146, 1963. Equipment for automated synthesis of polypeptides is commercially available from suppliers such as Perkin Elmer/Applied BioSystems Division (Foster City, Calif.), and may be operated according to the manufacturer's instructions.

[1111] In general, polypeptide compositions (including fusion polypeptides) of the invention are isolated. An “isolated” polypeptide is one that is removed from its original environment. For example, a naturally-occurring protein or polypeptide is isolated if it is separated from some or all of the coexisting materials in the natural system. Preferably, such polypeptides are also purified, e.g., are at least about 90% pure, more preferably at least about 95% pure and most preferably at least about 99% pure.

[1112] Polynucleotide Compositions

[1113] The present invention, in other aspects, provides polynucleotide compositions. The terms “DNA” and “polynucleotide” are used essentially interchangeably herein to refer to a DNA molecule that has been isolated free of total genomic DNA of a particular species. “Isolated,” as used herein, means that a polynucleotide is substantially away from other coding sequences, and that the DNA molecule does not contain large portions of unrelated coding DNA, such as large chromosomal fragments or other functional genes or polypeptide coding regions. Of course, this refers to the DNA molecule as originally isolated, and does not exclude genes or coding regions later added to the segment by the hand of man.

[1114] As will be understood by those skilled in the art, the polynucleotide compositions of this invention can include genomic sequences, extra-genomic and plasmid-encoded sequences and smaller engineered gene segments that express, or may be adapted to express, proteins, polypeptides, peptides and the like. Such segments may be naturally isolated, or modified synthetically by the hand of man.

[1115] As will be also recognized by the skilled artisan, polynucleotides of the invention may be single-stranded (coding or antisense) or double-stranded, and may be DNA (genomic, cDNA or synthetic) or RNA molecules. RNA molecules may include HnRNA molecules, which contain introns and correspond to a DNA molecule in a one-to-one manner, and mRNA molecules, which do not contain introns. Additional coding or non-coding sequences may, but need not, be present within a polynucleotide of the present invention, and a polynucleotide may, but need not, be linked to other molecules and/or support materials.

[1116] Polynucleotides may comprise a native sequence (i.e., an endogenous sequence that encodes a polypeptide/protein of the invention or a portion thereof) or may comprise a sequence that encodes a variant or derivative, preferably and immunogenic variant or derivative, of such a sequence.

[1117] Therefore, according to another aspect of the present invention, polynucleotide compositions are provided that comprise some or all of a polynucleotide sequence set forth in any one of SEQ ID NO:1-323, 341-782, 784-785, 788, 790, 792, 794, 796, 800-804, 807, 808, 810-826, 828-1664, 1668, 1669, 1676, 1680-1805, 1823, 1824, 1826-1829, 1861, 1862, 1865-1868, 1873, 1875, 1877, 1879, 1881, 1883, 1891-1900, 1910, 1914, 1918, 1922-1924, 1931, 1933, 1938, 1941, 1974-2002, and 2003, complements of a polynucleotide sequence set forth in any one of SEQ ID NO:1-323, 341-782, 784-785, 788, 790, 792, 794, 796, 800-804, 807, 808, 810-826, 828-1664, 1668, 1669, 1676, 1680-1805, 1823, 1824, 1826-1829, 1861, 1862, 1865-1868, 1873, 1875, 1877, 1879, 1881, 1883, 1891-1900, 1910, 1914, 1918, 1922-1924, 1931, 1933, 1938, 1941, 1974-2002, and 2003, and degenerate variants of a polynucleotide sequence set forth in any one of SEQ ID NO:1-323, 341-782, 784-785, 788, 790, 792, 794, 796, 800-804, 807, 808, 810-826, 828-1664, 1668, 1669, 1676, 1680-1805, 1823, 1824, 1826-1829, 1861, 1862, 1865-1868, 1873, 1875, 1877, 1879, 1881, 1883, 1891-1900, 1910, 1914, 1918, 1922-1924, 1931, 1933, 1938, 1941, 1974-2002, and 2003. In certain preferred embodiments, the polynucleotide sequences set forth herein encode immunogenic polypeptides, as described above.

[1118] In other related embodiments, the present invention provides polynucleotide variants having substantial identity to the sequences disclosed herein in SEQ ID NO:1-323, 341-782, 784-785, 788, 790, 792, 794, 796, 800-804, 807, 808, 810-826, 828-1664, 1668, 1669, 1676, 1680-1805, 1823, 1824, 1826-1829, 1861, 1862, 1865-1868, 1873, 1875, 1877, 1879, 1881, 1883, 1891-1900, 1910, 1914, 1918, 1922-1924, 1931, 1933, 1938, 1941, 1974-2002, and 2003, for example those comprising at least 70% sequence identity, preferably at least 75%, 80%, 85%, 90%, 95%, 96%, 97%, 98%, or 99% or higher, sequence identity compared to a polynucleotide sequence of this invention using the methods described herein, (e.g., BLAST analysis using standard parameters, as described below). One skilled in this art will recognize that these values can be appropriately adjusted to determine corresponding identity of proteins encoded by two nucleotide sequences by taking into account codon degeneracy, amino acid similarity, reading frame positioning and the like.

[1119] Typically, polynucleotide variants will contain one or more substitutions, additions, deletions and/or insertions, preferably such that the immunogenicity of the polypeptide encoded by the variant polynucleotide is not substantially diminished relative to a polypeptide encoded by a polynucleotide sequence specifically set forth herein). The term “variants” should also be understood to encompasses homologous genes of xenogenic origin.

[1120] In additional embodiments, the present invention provides polynucleotide fragments comprising various lengths of contiguous stretches of sequence identical to or complementary to one or more of the sequences disclosed herein. For example, polynucleotides are provided by this invention that comprise at least about 10, 15, 20, 30, 40, 50, 75, 100, 150, 200, 300, 400, 500 or 1000 or more contiguous nucleotides of one or more of the sequences disclosed herein as well as all intermediate lengths there between. It will be readily understood that “intermediate lengths”, in this context, means any length between the quoted values, such as 16, 17, 18, 19, etc.; 21, 22, 23, etc.; 30, 31, 32, etc.; 50, 51, 52, 53, etc.; 100, 101, 102, 103, etc.; 150, 151, 152, 153, etc.; including all integers through 200-500; 500-1,000, and the like.

[1121] In another embodiment of the invention, polynucleotide compositions are provided that are capable of hybridizing under moderate to high stringency conditions to a polynucleotide sequence provided herein, or a fragment thereof, or a complementary sequence thereof. Hybridization techniques are well known in the art of molecular biology. For purposes of illustration, suitable moderately stringent conditions for testing the hybridization of a polynucleotide of this invention with other polynucleotides include prewashing in a solution of 5×SSC, 0.5% SDS, 1.0 mM EDTA (pH 8.0); hybridizing at 50° C.-60° C., 5×SSC, overnight; followed by washing twice at 65° C. for 20 minutes with each of 2×, 0.5×and 0.2× SSC containing 0.1% SDS. One skilled in the art will understand that the stringency of hybridization can be readily manipulated, such as by altering the salt content of the hybridization solution and/or the temperature at which the hybridization is performed. For example, in another embodiment, suitable highly stringent hybridization conditions include those described above, with the exception that the temperature of hybridization is increased, e.g., to 60-65° C. or 65-70° C.

[1122] In certain preferred embodiments, the polynucleotides described above, e.g., polynucleotide variants, fragments and hybridizing sequences, encode polypeptides that are immunologically cross-reactive with a polypeptide sequence specifically set forth herein. In other preferred embodiments, such polynucleotides encode polypeptides that have a level of immunogenic activity of at least about 50%, preferably at least about 70%, and more preferably at least about 90% of that for a polypeptide sequence specifically set forth herein.

[1123] The polynucleotides of the present invention, or fragments thereof, regardless of the length of the coding sequence itself, may be combined with other DNA sequences, such as promoters, polyadenylation signals, additional restriction enzyme sites, multiple cloning sites, other coding segments, and the like, such that their overall length may vary considerably. It is therefore contemplated that a nucleic acid fragment of almost any length may be employed, with the total length preferably being limited by the ease of preparation and use in the intended recombinant DNA protocol. For example, illustrative polynucleotide segments with total lengths of about 10,000, about 5000, about 3000, about 2,000, about 1,000, about 500, about 200, about 100, about 50 base pairs in length, and the like, (including all intermediate lengths) are contemplated to be useful in many implementations of this invention.

[1124] When comparing polynucleotide sequences, two sequences are said to be “identical” if the sequence of nucleotides in the two sequences is the same when aligned for maximum correspondence, as described below. Comparisons between two sequences are typically performed by comparing the sequences over a comparison window to identify and compare local regions of sequence similarity. A “comparison window” as used herein, refers to a segment of at least about 20 contiguous positions, usually 30 to about 75, 40 to about 50, in which a sequence may be compared to a reference sequence of the same number of contiguous positions after the two sequences are optimally aligned.

[1125] Optimal alignment of sequences for comparison may be conducted using the Megalign program in the Lasergene suite of bioinformatics software (DNASTAR, Inc., Madison, Wis.), using default parameters. This program embodies several alignment schemes described in the following references: Dayhoff, M. O. (1978) A model of evolutionary change in proteins—Matrices for detecting distant relationships. In Dayhoff, M. O. (ed.) Atlas of Protein Sequence and Structure, National Biomedical Research Foundation, Washington D.C. Vol. 5, Suppl. 3, pp. 345-358; Hein J. (1990) Unified Approach to Alignment and Phylogenes pp. 626-645 Methods in Enzymology vol. 183, Academic Press, Inc., San Diego, Calif.; Higgins, D. G. and Sharp, P. M. (1989) CABIOS 5:151-153; Myers, E. W. and Muller W. (1988) CABIOS 4:11-17; Robinson, E. D. (1971) Comb. Theor 11:105; Santou, N. Nes, M. (1987) Mol. Biol. Evol. 4:406-425; Sneath, P. H. A. and Sokal, R. R. (1973) Numerical Taxonomy—the Principles and Practice of Numerical Taxonomy, Freeman Press, San Francisco, Calif.; Wilbur, W. J. and Lipman, D. J. (1983) Proc. Natl. Acad., Sci. USA 80:726-730.

[1126] Alternatively, optimal alignment of sequences for comparison may be conducted by the local identity algorithm of Smith and Waterman (1981) Add. APL. Math 2:482, by the identity alignment algorithm of Needleman and Wunsch (1970) J. Mol. Biol. 48:443, by the search for similarity methods of Pearson and Lipman (1988) Proc. Natl. Acad. Sci. USA 85: 2444, by computerized implementations of these algorithms (GAP, BESTFIT, BLAST, FASTA, and TFASTA in the Wisconsin Genetics Software Package, Genetics Computer Group (GCG), 575 Science Dr., Madison, Wis.), or by inspection.

[1127] One preferred example of algorithms that are suitable for determining percent sequence identity and sequence similarity are the BLAST and BLAST 2.0 algorithms, which are described in Altschul et al. (1977) Nucl. Acids Res. 25:3389-3402 and Altschul et al. (1990) J. Mol. Biol. 215:403-410, respectively. BLAST and BLAST 2.0 can be used, for example with the parameters described herein, to determine percent sequence identity for the polynucleotides of the invention. Software for performing BLAST analyses is publicly available through the National Center for Biotechnology Information. In one illustrative example, cumulative scores can be calculated using, for nucleotide sequences, the parameters M (reward score for a pair of matching residues; always >0) and N (penalty score for mismatching residues; always <0). Extension of the word hits in each direction are halted when: the cumulative alignment score falls off by the quantity X from its maximum achieved value; the cumulative score goes to zero or below, due to the accumulation of one or more negative-scoring residue alignments; or the end of either sequence is reached. The BLAST algorithm parameters W, T and X determine the sensitivity and speed of the alignment. The BLASTN program (for nucleotide sequences) uses as defaults a wordlength (W) of 11, and expectation (E) of 10, and the BLOSUM62 scoring matrix (see Henikoff and Henikoff (1989) Proc. Natl. Acad. Sci. USA 89:10915) alignments, (B) of 50, expectation (E) of 10, M=5, N=−4 and a comparison of both strands.

[1128] Preferably, the “percentage of sequence identity” is determined by comparing two optimally aligned sequences over a window of comparison of at least 20 positions, wherein the portion of the polynucleotide sequence in the comparison window may comprise additions or deletions (i.e., gaps) of 20 percent or less, usually 5 to 15 percent, or 10 to 12 percent, as compared to the reference sequences (which does not comprise additions or deletions) for optimal alignment of the two sequences. The percentage is calculated by determining the number of positions at which the identical nucleic acid bases occurs in both sequences to yield the number of matched positions, dividing the number of matched positions by the total number of positions in the reference sequence (i.e., the window size) and multiplying the results by 100 to yield the percentage of sequence identity.

[1129] It will be appreciated by those of ordinary skill in the art that, as a result of the degeneracy of the genetic code, there are many nucleotide sequences that encode a polypeptide as described herein. Some of these polynucleotides bear minimal homology to the nucleotide sequence of any native gene. Nonetheless, polynucleotides that vary due to differences in codon usage are specifically contemplated by the present invention. Further, alleles of the genes comprising the polynucleotide sequences provided herein are within the scope of the present invention. Alleles are endogenous genes that are altered as a result of one or more mutations, such as deletions, additions and/or substitutions of nucleotides. The resulting mRNA and protein may, but need not, have an altered structure or function. Alleles may be identified using standard techniques (such as hybridization, amplification and/or database sequence comparison).

[1130] Therefore, in another embodiment of the invention, a mutagenesis approach, such as site-specific mutagenesis, is employed for the preparation of immunogenic variants and/or derivatives of the polypeptides described herein. By this approach, specific modifications in a polypeptide sequence can be made through mutagenesis of the underlying polynucleotides that encode them. These techniques provides a straightforward approach to prepare and test sequence variants, for example, incorporating one or more of the foregoing considerations, by introducing one or more nucleotide sequence changes into the polynucleotide.

[1131] Site-specific mutagenesis allows the production of mutants through the use of specific oligonucleotide sequences which encode the DNA sequence of the desired mutation, as well as a sufficient number of adjacent nucleotides, to provide a primer sequence of sufficient size and sequence complexity to form a stable duplex on both sides of the deletion junction being traversed. Mutations may be employed in a selected polynucleotide sequence to improve, alter, decrease, modify, or otherwise change the properties of the polynucleotide itself, and/or alter the properties, activity, composition, stability, or primary sequence of the encoded polypeptide.

[1132] In certain embodiments of the present invention, the inventors contemplate the mutagenesis of the disclosed polynucleotide sequences to alter one or more properties of the encoded polypeptide, such as the immunogenicity of a polypeptide vaccine. The techniques of site-specific mutagenesis are well-known in the art, and are widely used to create variants of both polypeptides and polynucleotides. For example, site-specific mutagenesis is often used to alter a specific portion of a DNA molecule. In such embodiments, a primer comprising typically about 14 to about 25 nucleotides or so in length is employed, with about 5 to about 10 residues on both sides of the junction of the sequence being altered.

[1133] As will be appreciated by those of skill in the art, site-specific mutagenesis techniques have often employed a phage vector that exists in both a single stranded and double stranded form. Typical vectors useful in site-directed mutagenesis include vectors such as the M13 phage. These phage are readily commercially-available and their use is generally well-known to those skilled in the art. Double-stranded plasmids are also routinely employed in site directed mutagenesis that eliminates the step of transferring the gene of interest from a plasmid to a phage.

[1134] In general, site-directed mutagenesis in accordance herewith is performed by first obtaining a single-stranded vector or melting apart of two strands of a double-stranded vector that includes within its sequence a DNA sequence that encodes the desired peptide. An oligonucleotide primer bearing the desired mutated sequence is prepared, generally synthetically. This primer is then annealed with the single-stranded vector, and subjected to DNA polymerizing enzymes such as E. coli polymerase I Klenow fragment, in order to complete the synthesis of the mutation-bearing strand. Thus, a heteroduplex is formed wherein one strand encodes the original non-mutated sequence and the second strand bears the desired mutation. This heteroduplex vector is then used to transform appropriate cells, such as E. coli cells, and clones are selected which include recombinant vectors bearing the mutated sequence arrangement.

[1135] The preparation of sequence variants of the selected peptide-encoding DNA segments using site-directed mutagenesis provides a means of producing potentially useful species and is not meant to be limiting as there are other ways in which sequence variants of peptides and the DNA sequences encoding them may be obtained. For example, recombinant vectors encoding the desired peptide sequence may be treated with mutagenic agents, such as hydroxylamine, to obtain sequence variants. Specific details regarding these methods and protocols are found in the teachings of Maloy et al., 1994; Segal, 1976; Prokop and Bajpai, 1991; Kuby, 1994; and Maniatis et al., 1982, each incorporated herein by reference, for that purpose.

[1136] As used herein, the term “oligonucleotide directed mutagenesis procedure” refers to template-dependent processes and vector-mediated propagation which result in an increase in the concentration of a specific nucleic acid molecule relative to its initial concentration, or in an increase in the concentration of a detectable signal, such as amplification. As used herein, the term “oligonucleotide directed mutagenesis procedure” is intended to refer to a process that involves the template-dependent extension of a primer molecule. The term template dependent process refers to nucleic acid synthesis of an RNA or a DNA molecule wherein the sequence of the newly synthesized strand of nucleic acid is dictated by the well-known rules of complementary base pairing (see, for example, Watson, 1987). Typically, vector mediated methodologies involve the introduction of the nucleic acid fragment into a DNA or RNA vector, the clonal amplification of the vector, and the recovery of the amplified nucleic acid fragment. Examples of such methodologies are provided by U.S. Pat. No. 4,237,224, specifically incorporated herein by reference in its entirety.

[1137] In another approach for the production of polypeptide variants of the present invention, recursive sequence recombination, as described in U.S. Pat. No. 5,837,458, may be employed. In this approach, iterative cycles of recombination and screening or selection are performed to “evolve” individual polynucleotide variants of the invention having, for example, enhanced immunogenic activity.

[1138] In other embodiments of the present invention, the polynucleotide sequences provided herein can be advantageously used as probes or primers for nucleic acid hybridization. As such, it is contemplated that nucleic acid segments that comprise a sequence region of at least about 15 nucleotide long contiguous sequence that has the same sequence as, or is complementary to, a 15 nucleotide long contiguous sequence disclosed herein will find particular utility. Longer contiguous identical or complementary sequences, e.g., those of about 20, 30, 40, 50, 100, 200, 500, 1000 (including all intermediate lengths) and even up to full length sequences will also be of use in certain embodiments.

[1139] The ability of such nucleic acid probes to specifically hybridize to a sequence of interest will enable them to be of use in detecting the presence of complementary sequences in a given sample. However, other uses are also envisioned, such as the use of the sequence information for the preparation of mutant species primers, or primers for use in preparing other genetic constructions.

[1140] Polynucleotide molecules having sequence regions consisting of contiguous nucleotide stretches of 10-14, 15-20, 30, 50, or even of 100-200 nucleotides or so (including intermediate lengths as well), identical or complementary to a polynucleotide sequence disclosed herein, are particularly contemplated as hybridization probes for use in, e.g., Southern and Northern blotting. This would allow a gene product, or fragment thereof, to be analyzed, both in diverse cell types and also in various bacterial cells. The total size of fragment, as well as the size of the complementary stretch(es), will ultimately depend on the intended use or application of the particular nucleic acid segment. Smaller fragments will generally find use in hybridization embodiments, wherein the length of the contiguous complementary region may be varied, such as between about 15 and about 100 nucleotides, but larger contiguous complementarity stretches may be used, according to the length complementary sequences one wishes to detect.

[1141] The use of a hybridization probe of about 15-25 nucleotides in length allows the formation of a duplex molecule that is both stable and selective. Molecules having contiguous complementary sequences over stretches greater than 15 bases in length are generally preferred, though, in order to increase stability and selectivity of the hybrid, and thereby improve the quality and degree of specific hybrid molecules obtained. One will generally prefer to design nucleic acid molecules having gene-complementary stretches of 15 to 25 contiguous nucleotides, or even longer where desired.

[1142] Hybridization probes may be selected from any portion of any of the sequences disclosed herein. All that is required is to review the sequences set forth herein, or to any continuous portion of the sequences, from about 15-25 nucleotides in length up to and including the full length sequence, that one wishes to utilize as a probe or primer. The choice of probe and primer sequences may be governed by various factors. For example, one may wish to employ primers from towards the termini of the total sequence.

[1143] Small polynucleotide segments or fragments may be readily prepared by, for example, directly synthesizing the fragment by chemical means, as is commonly practiced using an automated oligonucleotide synthesizer. Also, fragments may be obtained by application of nucleic acid reproduction technology, such as the PCR™ technology of U.S. Pat. No. 4,683,202 (incorporated herein by reference), by introducing selected sequences into recombinant vectors for recombinant production, and by other recombinant DNA techniques generally known to those of skill in the art of molecular biology.

[1144] The nucleotide sequences of the invention may be used for their ability to selectively form duplex molecules with complementary stretches of the entire gene or gene fragments of interest. Depending on the application envisioned, one will typically desire to employ varying conditions of hybridization to achieve varying degrees of selectivity of probe towards target sequence. For applications requiring high selectivity, one will typically desire to employ relatively stringent conditions to form the hybrids, e.g., one will select relatively low salt and/or high temperature conditions, such as provided by a salt concentration of from about 0.02 M to about 0.15 M salt at temperatures of from about 50° C. to about 70° C. Such selective conditions tolerate little, if any, mismatch between the probe and the template or target strand, and would be particularly suitable for isolating related sequences.

[1145] Of course, for some applications, for example, where one desires to prepare mutants employing a mutant primer strand hybridized to an underlying template, less stringent (reduced stringency) hybridization conditions will typically be needed in order to allow formation of the heteroduplex. In these circumstances, one may desire to employ salt conditions such as those of from about 0.15 M to about 0.9 M salt, at temperatures ranging from about 20° C. to about 55° C. Cross-hybridizing species can thereby be readily identified as positively hybridizing signals with respect to control hybridizations. In any case, it is generally appreciated that conditions can be rendered more stringent by the addition of increasing amounts of formamide, which serves to destabilize the hybrid duplex in the same manner as increased temperature. Thus, hybridization conditions can be readily manipulated, and thus will generally be a method of choice depending on the desired results.

[1146] According to another embodiment of the present invention, polynucleotide compositions comprising antisense oligonucleotides are provided. Antisense oligonucleotides have been demonstrated to be effective and targeted inhibitors of protein synthesis, and, consequently, provide a therapeutic approach by which a disease can be treated by inhibiting the synthesis of proteins that contribute to the disease. The efficacy of antisense oligonucleotides for inhibiting protein synthesis is well established. For example, the synthesis of polygalactauronase and the muscarine type 2 acetylcholine receptor are inhibited by antisense oligonucleotides directed to their respective mRNA sequences (U.S. Pat. No. 5,739,119 and U.S. Pat. No. 5,759,829). Further, examples of antisense inhibition have been demonstrated with the nuclear protein cyclin, the multiple drug resistance gene (MDG1), ICAM-1, E-selectin, STK-1, striatal GABA_{A} receptor and human EGF (Jaskulski et al., Science. Jun. 10, 1988;240(4858):1544-6; Vasanthakumar and Ahmed, Cancer Commun. 1989;1(4):225-32; Peris et al., Brain Res Mol Brain Res. Jun. 15, 1998;57(2):310-20; U.S. Pat. No. 5,801,154; U.S. Pat. No. 5,789,573; U.S. Pat. No. 5,718,709 and U.S. Pat. No. 5,610,288). Antisense constructs have also been described that inhibit and can be used to treat a variety of abnormal cellular proliferations, e.g. cancer (U.S. Pat. No. 5,747,470; U.S. Pat. No. 5,591,317 and U.S. Pat. No. 5,783,683).

[1147] Therefore, in certain embodiments, the present invention provides oligonucleotide sequences that comprise all, or a portion of, any sequence that is capable of specifically binding to polynucleotide sequence described herein, or a complement thereof. In one embodiment, the antisense oligonucleotides comprise DNA or derivatives thereof. In another embodiment, the oligonucleotides comprise RNA or derivatives thereof. In a third embodiment, the oligonucleotides are modified DNAs comprising a phosphorothioated modified backbone. In a fourth embodiment, the oligonucleotide sequences comprise peptide nucleic acids or derivatives thereof. In each case, preferred compositions comprise a sequence region that is complementary, and more preferably substantially-complementary, and even more preferably, completely complementary to one or more portions of polynucleotides disclosed herein. Selection of antisense compositions specific for a given gene sequence is based upon analysis of the chosen target sequence and determination of secondary structure, Tₘ, binding energy, and relative stability. Antisense compositions may be selected based upon their relative inability to form dimers, hairpins, or other secondary structures that would reduce or prohibit specific binding to the target mRNA in a host cell. Highly preferred target regions of the mRNA, are those which are at or near the AUG translation initiation codon, and those sequences which are substantially complementary to 5′ regions of the mRNA. These secondary structure analyses and target site selection considerations can be performed, for example, using v.4 of the OLIGO primer analysis software and/or the BLASTN 2.0.5 algorithm software (Altschul et al., Nucleic Acids Res. 1997, 25(17):3389-402).

[1148] The use of an antisense delivery method employing a short peptide vector, termed MPG (27 residues), is also contemplated. The MPG peptide contains a hydrophobic domain derived from the fusion sequence of HIV gp41 and a hydrophilic domain from the nuclear localization sequence of SV40 T-antigen (Morris et al., Nucleic Acids Res. Jul. 15, 1997;25(14):2730-6). It has been demonstrated that several molecules of the MPG peptide coat the antisense oligonucleotides and can be delivered into cultured mammalian cells in less than 1 hour with relatively high efficiency (90%). Further, the interaction with MPG strongly increases both the stability of the oligonucleotide to nuclease and the ability to cross the plasma membrane.

[1149] According to another embodiment of the invention, the polynucleotide compositions described herein are used in the design and preparation of ribozyme molecules for inhibiting expression of the tumor polypeptides and proteins of the present invention in tumor cells. Ribozymes are RNA-protein complexes that cleave nucleic acids in a site-specific fashion. Ribozymes have specific catalytic domains that possess endonuclease activity (Kim and Cech, Proc Natl Acad Sci USA. 1987 December; 84(24):8788-92; Forster and Symons, Cell. Apr. 24, 1987;49(2):211-20). For example, a large number of ribozymes accelerate phosphoester transfer reactions with a high degree of specificity, often cleaving only one of several phosphoesters in an oligonucleotide substrate (Cech et al., Cell. 1981 December; 27(3 Pt 2):487-96; Michel and Westhof, J. Mol. Biol. Dec. 5, 1990;216(3):585-610; Reinhold-Hurek and Shub, Nature. May 14, 1992;357(6374):173-6). This specificity has been attributed to the requirement that the substrate bind via specific base-pairing interactions to the internal guide sequence (“IGS”) of the ribozyme prior to chemical reaction.

[1150] Six basic varieties of naturally-occurring enzymatic RNAs are known presently. Each can catalyze the hydrolysis of RNA phosphodiester bonds in trans (and thus can cleave other RNA molecules) under physiological conditions. In general, enzymatic nucleic acids act by first binding to a target RNA. Such binding occurs through the target binding portion of a enzymatic nucleic acid which is held in close proximity to an enzymatic portion of the molecule that acts to cleave the target RNA. Thus, the enzymatic nucleic acid first recognizes and then binds a target RNA through complementary base-pairing, and once bound to the correct site, acts enzymatically to cut the target RNA. Strategic cleavage of such a target RNA will destroy its ability to direct synthesis of an encoded protein. After an enzymatic nucleic acid has bound and cleaved its RNA target, it is released from that RNA to search for another target and can repeatedly bind and cleave new targets.

[1151] The enzymatic nature of a ribozyme is advantageous over many technologies, such as antisense technology (where a nucleic acid molecule simply binds to a nucleic acid target to block its translation) since the concentration of ribozyme necessary to affect a therapeutic treatment is lower than that of an antisense oligonucleotide. This advantage reflects the ability of the ribozyme to act enzymatically. Thus, a single ribozyme molecule is able to cleave many molecules of target RNA. In addition, the ribozyme is a highly specific inhibitor, with the specificity of inhibition depending not only on the base pairing mechanism of binding to the target RNA, but also on the mechanism of target RNA cleavage. Single mismatches, or base-substitutions, near the site of cleavage can completely eliminate catalytic activity of a ribozyme. Similar mismatches in antisense molecules do not prevent their action (Woolf et al., Proc Natl Acad Sci USA. Aug. 15, 1992;89(16):7305-9). Thus, the specificity of action of a ribozyme is greater than that of an antisense oligonucleotide binding the same RNA site.

[1152] The enzymatic nucleic acid molecule may be formed in a hammerhead, hairpin, a hepatitis δ virus, group I intron or RNaseP RNA (in association with an RNA guide sequence) or Neurospora VS RNA motif. Examples of hammerhead motifs are described by Rossi et al. Nucleic Acids Res. Sep. 11, 1992 ;20(17):4559-65. Examples of hairpin motifs are described by Hampel et al. (Eur. Pat. Appl. Publ. No. EP 0360257), Hampel and Tritz, Biochemistry Jun. 13, 1989;28(12):4929-33; Hampel et al., Nucleic Acids Res. Jan. 25, 1990;18(2):299-304 and U.S. Pat. No. 5,631,359. An example of the hepatitis 6 virus motif is described by Perrotta and Been, Biochemistry. Dec. 1, 1992;31(47):11843-52; an example of the RNaseP motif is described by Guerrier-Takada et al., Cell. 1983 December; 35(3 Pt 2):849-57; Neurospora VS RNA ribozyme motif is described by Collins (Saville and Collins, Cell. May 18, 1990;61(4):685-96; Saville and Collins, Proc Natl Acad Sci USA. Oct. 1, 1991;88(19):8826-30; Collins and Olive, Biochemistry. Mar. 23, 1993;32(11):2795-9); and an example of the Group I intron is described in (U.S. Pat. No. 4,987,071). All that is important in an enzymatic nucleic acid molecule of this invention is that it has a specific substrate binding site which is complementary to one or more of the target gene RNA regions, and that it have nucleotide sequences within or surrounding that substrate binding site which impart an RNA cleaving activity to the molecule. Thus the ribozyme constructs need not be limited to specific motifs mentioned herein.

[1153] Ribozymes may be designed as described in Int. Pat. Appl. Publ. No. WO 93/23569 and Int. Pat. Appl. Publ. No. WO 94/02595, each specifically incorporated herein by reference) and synthesized to be tested in vitro and in vivo, as described. Such ribozymes can also be optimized for delivery. While specific examples are provided, those in the art will recognize that equivalent RNA targets in other species can be utilized when necessary.

[1154] Ribozyme activity can be optimized by altering the length of the ribozyme binding arms, or chemically synthesizing ribozymes with modifications that prevent their degradation by serum ribonucleases (see e.g., Int. Pat. Appl. Publ. No. WO 92/07065; Int. Pat. Appl. Publ. No. WO 93/15187; Int. Pat. Appl. Publ. No. WO 91/03162; Eur. Pat. Appl. Publ. No. 92110298.4; U.S. Pat. No. 5,334,711; and Int. Pat. Appl. Publ. No. WO 94/13688, which describe various chemical modifications that can be made to the sugar moieties of enzymatic RNA molecules), modifications which enhance their efficacy in cells, and removal of stem II bases to shorten RNA synthesis times and reduce chemical requirements.

[1155] Sullivan et al. (Int. Pat. Appl. Publ. No. WO 94/02595) describes the general methods for delivery of enzymatic RNA molecules. Ribozymes may be administered to cells by a variety of methods known to those familiar to the art, including, but not restricted to, encapsulation in liposomes, by iontophoresis, or by incorporation into other vehicles, such as hydrogels, cyclodextrins, biodegradable nanocapsules, and bioadhesive microspheres. For some indications, ribozymes may be directly delivered ex vivo to cells or tissues with or without the aforementioned vehicles. Alternatively, the RNA/vehicle combination may be locally delivered by direct inhalation, by direct injection or by use of a catheter, infusion pump or stent. Other routes of delivery include, but are not limited to, intravascular, intramuscular, subcutaneous or joint injection, aerosol inhalation, oral (tablet or pill form), topical, systemic, ocular, intraperitoneal and/or intrathecal delivery. More detailed descriptions of ribozyme delivery and administration are provided in Int. Pat. Appl. Publ. No. WO 94/02595 and Int. Pat. Appl. Publ. No. WO 93/23569, each specifically incorporated herein by reference.

[1156] Another means of accumulating high concentrations of a ribozyme(s) within cells is to incorporate the ribozyme-encoding sequences into a DNA expression vector. Transcription of the ribozyme sequences are driven from a promoter for eukaryotic RNA polymerase I (pol I), RNA polymerase II (pol II), or RNA polymerase III (pol III). Transcripts from pol II or pol III promoters will be expressed at high levels in all cells; the levels of a given pol II promoter in a given cell type will depend on the nature of the gene regulatory sequences (enhancers, silencers, etc.) present nearby. Prokaryotic RNA polymerase promoters may also be used, providing that the prokaryotic RNA polymerase enzyme is expressed in the appropriate cells Ribozymes expressed from such promoters have been shown to function in mammalian cells. Such transcription units can be incorporated into a variety of vectors for introduction into mammalian cells, including but not restricted to, plasmid DNA vectors, viral DNA vectors (such as adenovirus or adeno-associated vectors), or viral RNA vectors (such as retroviral, semliki forest virus, sindbis virus vectors).

[1157] In another embodiment of the invention, peptide nucleic acids (PNAs) compositions are provided. PNA is a DNA mimic in which the nucleobases are attached to a pseudopeptide backbone (Good and Nielsen, Antisense Nucleic Acid Drug Dev. 1997 (4) 431-37). PNA is able to be utilized in a number methods that traditionally have used RNA or DNA. Often PNA sequences perform better in techniques than the corresponding RNA or DNA sequences and have utilities that are not inherent to RNA or DNA. A review of PNA including methods of making, characteristics of, and methods of using, is provided by Corey (Trends Biotechnol 1997 June; 15(6):224-9). As such, in certain embodiments, one may prepare PNA sequences that are complementary to one or more portions of the ACE mRNA sequence, and such PNA compositions may be used to regulate, alter, decrease, or reduce the translation of ACE-specific mRNA, and thereby alter the level of ACE activity in a host cell to which such PNA compositions have been administered.

[1158] PNAs have 2-aminoethyl-glycine linkages replacing the normal phosphodiester backbone of DNA (Nielsen et al., Science Dec. 6, 1991; 254(5037):1497-500; Hanvey et al., Science. Nov. 27, 1992; 258(5087):1481-5; Hyrup and Nielsen, Bioorg Med Chem. 1996 January; 4(1):5-23). This chemistry has three important consequences: firstly, in contrast to DNA or phosphorothioate oligonucleotides, PNAs are neutral molecules; secondly, PNAs are achiral, which avoids the need to develop a stereoselective synthesis; and thirdly, PNA synthesis uses standard Boc or Fmoc protocols for solid-phase peptide synthesis, although other methods, including a modified Merrifield method, have been used.

[1159] PNA monomers or ready-made oligomers are commercially available from PerSeptive Biosystems (Framingham, Mass.). PNA syntheses by either Boc or Fmoc protocols are straightforward using manual or automated protocols (Norton et al., Bioorg Med Chem. 1995 April; 3(4):437-45). The manual protocol lends itself to the production of chemically modified PNAs or the simultaneous synthesis of families of closely related PNAs.

[1160] As with peptide synthesis, the success of a particular PNA synthesis will depend on the properties of the chosen sequence. For example, while in theory PNAs can incorporate any combination of nucleotide bases, the presence of adjacent purines can lead to deletions of one or more residues in the product. In expectation of this difficulty, it is suggested that, in producing PNAs with adjacent purines, one should repeat the coupling of residues likely to be added inefficiently. This should be followed by the purification of PNAs by reverse-phase high-pressure liquid chromatography, providing yields and purity of product similar to those observed during the synthesis of peptides.

[1161] Modifications of PNAs for a given application may be accomplished by coupling amino acids during solid-phase synthesis or by attaching compounds that contain a carboxylic acid group to the exposed N-terminal amine. Alternatively, PNAs can be modified after synthesis by coupling to an introduced lysine or cysteine. The ease with which PNAs can be modified facilitates optimization for better solubility or for specific functional requirements. Once synthesized, the identity of PNAs and their derivatives can be confirmed by mass spectrometry. Several studies have made and utilized modifications of PNAs (for example, Norton et al., Bioorg Med Chem. 1995 April; 3(4):437-45; Petersen et al., J Pept Sci. 1995 May-June; 1(3):175-83; Orum et al., Biotechniques. 1995 September; 19(3):472-80; Footer et al., Biochemistry. Aug. 20, 1996;35(33):10673-9; Griffith et al., Nucleic Acids Res. Aug. 11, 1995 ;23(15):3003-8; Pardridge et al., Proc Natl Acad Sci USA. Jun. 6, 1995;92(12):5592-6; Boffa et al., Proc Natl Acad Sci USA. Mar. 14, 1995;92(6):1901-5; Gambacorti-Passerini et al., Blood. Aug. 15, 1996;88(4):1411-7; Armitage et al., Proc Natl Acad Sci USA. Nov. 11, 1997 ;94(23):12320-5; Seeger et al., Biotechniques. 1997 September;23(3):512-7). U.S. Pat. No. 5,700,922 discusses PNA-DNA-PNA chimeric molecules and their uses in diagnostics, modulating protein in organisms, and treatment of conditions susceptible to therapeutics.

[1162] Methods of characterizing the antisense binding properties of PNAs are discussed in Rose (Anal Chem. Dec. 15, 1993;65(24):3545-9) and Jensen et al. (Biochemistry. Apr. 22, 1997;36(16):5072-7). Rose uses capillary gel electrophoresis to determine binding of PNAs to their complementary oligonucleotide, measuring the relative binding kinetics and stoichiometry. Similar types of measurements were made by Jensen et al. using BIAcore™ technology.

[1163] Other applications of PNAs that have been described and will be apparent to the skilled artisan include use in DNA strand invasion, antisense inhibition, mutational analysis, enhancers of transcription, nucleic acid purification, isolation of transcriptionally active genes, blocking of transcription factor binding, genome cleavage, biosensors, in situ hybridization, and the like.

[1164] Polynucleotide Identification, Characterization and Expression

[1165] Polynucleotides compositions of the present invention may be identified, prepared and/or manipulated using any of a variety of well established techniques (see generally, Sambrook et al., Molecular Cloning: A Laboratory Manual, Cold Spring Harbor Laboratories, Cold Spring Harbor, N.Y., 1989, and other like references). For example, a polynucleotide may be identified, as described in more detail below, by screening a microarray of cDNAs for tumor-associated expression (i.e., expression that is at least two fold greater in a tumor than in normal tissue, as determined using a representative assay provided herein). Such screens may be performed, for example, using the microarray technology of Affymetrix, Inc. (Santa Clara, Calif.) according to the manufacturer's instructions (and essentially as described by Schena et al., Proc. Natl. Acad. Sci. USA 93:10614-10619, 1996 and Heller et al., Proc. Natl. Acad. Sci. USA 94:2150-2155, 1997). Alternatively, polynucleotides may be amplified from cDNA prepared from cells expressing the proteins described herein, such as tumor cells.

[1166] Many template dependent processes are available to amplify a target sequences of interest present in a sample. One of the best known amplification methods is the polymerase chain reaction (PCR™) which is described in detail in U.S. Pat. Nos. 4,683,195, 4,683,202 and 4,800,159, each of which is incorporated herein by reference in its entirety. Briefly, in PCR™, two primer sequences are prepared which are complementary to regions on opposite complementary strands of the target sequence. An excess of deoxynucleoside triphosphates is added to a reaction mixture along with a DNA polymerase (e.g., Taq polymerase). If the target sequence is present in a sample, the primers will bind to the target and the polymerase will cause the primers to be extended along the target sequence by adding on nucleotides. By raising and lowering the temperature of the reaction mixture, the extended primers will dissociate from the target to form reaction products, excess primers will bind to the target and to the reaction product and the process is repeated. Preferably reverse transcription and PCR™ amplification procedure may be performed in order to quantify the amount of mRNA amplified. Polymerase chain reaction methodologies are well known in the art.

[1167] Any of a number of other template dependent processes, many of which are variations of the PCR™ amplification technique, are readily known and available in the art. Illustratively, some such methods include the ligase chain reaction (referred to as LCR), described, for example, in Eur. Pat. Appl. Publ. No. 320,308 and U.S. Pat. No. 4,883,750; Qbeta Replicase, described in PCT Intl. Pat. Appl. Publ. No. PCT/US87/00880; Strand Displacement Amplification (SDA) and Repair Chain Reaction (RCR). Still other amplification methods are described in Great Britain Pat. Appl. No. 2 202 328, and in PCT Intl. Pat. Appl. Publ. No. PCT/US89/01025. Other nucleic acid amplification procedures include transcription-based amplification systems (TAS) (PCT Intl. Pat. Appl. Publ. No. WO 88/10315), including nucleic acid sequence based amplification (NASBA) and 3SR. Eur. Pat. Appl. Publ. No. 329,822 describes a nucleic acid amplification process involving cyclically synthesizing single-stranded RNA (“ssRNA”), ssDNA, and double-stranded DNA (dsDNA). PCT Intl. Pat. Appl. Publ. No. WO 89/06700 describes a nucleic acid sequence amplification scheme based on the hybridization of a promoter/primer sequence to a target single-stranded DNA (“ssDNA”) followed by transcription of many RNA copies of the sequence. Other amplification methods such as “RACE” (Frohman, 1990), and “one-sided PCR” (Ohara, 1989) are also well-known to those of skill in the art.

[1168] An amplified portion of a polynucleotide of the present invention may be used to isolate a full length gene from a suitable library (e.g., a tumor cDNA library) using well known techniques. Within such techniques, a library (cDNA or genomic) is screened using one or more polynucleotide probes or primers suitable for amplification. Preferably, a library is size-selected to include larger molecules. Random primed libraries may also be preferred for identifying 5′ and upstream regions of genes. Genomic libraries are preferred for obtaining introns and extending 5′ sequences.

[1169] For hybridization techniques, a partial sequence may be labeled (e.g., by nick-translation or end-labeling with ³²P) using well known techniques. A bacterial or bacteriophage library is then generally screened by hybridizing filters containing denatured bacterial colonies (or lawns containing phage plaques) with the labeled probe (see Sambrook et al., Molecular Cloning: A Laboratory Manual, Cold Spring Harbor Laboratories, Cold Spring Harbor, N.Y., 1989). Hybridizing colonies or plaques are selected and expanded, and the DNA is isolated for further analysis. cDNA clones may be analyzed to determine the amount of additional sequence by, for example, PCR using a primer from the partial sequence and a primer from the vector. Restriction maps and partial sequences may be generated to identify one or more overlapping clones. The complete sequence may then be determined using standard techniques, which may involve generating a series of deletion clones. The resulting overlapping sequences can then assembled into a single contiguous sequence. A full length cDNA molecule can be generated by ligating suitable fragments, using well known techniques.

[1170] Alternatively, amplification techniques, such as those described above, can be useful for obtaining a full length coding sequence from a partial cDNA sequence. One such amplification technique is inverse PCR (see Triglia et al., Nucl. Acids Res. 16:8186, 1988), which uses restriction enzymes to generate a fragment in the known region of the gene. The fragment is then circularized by intramolecular ligation and used as a template for PCR with divergent primers derived from the known region. Within an alternative approach, sequences adjacent to a partial sequence may be retrieved by amplification with a primer to a linker sequence and a primer specific to a known region. The amplified sequences are typically subjected to a second round of amplification with the same linker primer and a second primer specific to the known region. A variation on this procedure, which employs two primers that initiate extension in opposite directions from the known sequence, is described in WO 96/38591. Another such technique is known as “rapid amplification of cDNA ends” or RACE. This technique involves the use of an internal primer and an external primer, which hybridizes to a polyA region or vector sequence, to identify sequences that are 5′ and 3′ of a known sequence. Additional techniques include capture PCR (Lagerstrom et al., PCR Methods Applic. 1:111-19, 1991) and walking PCR (Parker et al., Nucl. Acids. Res. 19:3055-60, 1991). Other methods employing amplification may also be employed to obtain a full length cDNA sequence.

[1171] In certain instances, it is possible to obtain a full length cDNA sequence by analysis of sequences provided in an expressed sequence tag (EST) database, such as that available from GenBank. Searches for overlapping ESTs may generally be performed using well known programs (e.g., NCBI BLAST searches), and such ESTs may be used to generate a contiguous full length sequence. Full length DNA sequences may also be obtained by analysis of genomic fragments.

[1172] In other embodiments of the invention, polynucleotide sequences or fragments thereof which encode polypeptides of the invention, or fusion proteins or functional equivalents thereof, may be used in recombinant DNA molecules to direct expression of a polypeptide in appropriate host cells. Due to the inherent degeneracy of the genetic code, other DNA sequences that encode substantially the same or a functionally equivalent amino acid sequence may be produced and these sequences may be used to clone and express a given polypeptide.

[1173] As will be understood by those of skill in the art, it may be advantageous in some instances to produce polypeptide-encoding nucleotide sequences possessing non-naturally occurring codons. For example, codons preferred by a particular prokaryotic or eukaryotic host can be selected to increase the rate of protein expression or to produce a recombinant RNA transcript having desirable properties, such as a half-life which is longer than that of a transcript generated from the naturally occurring sequence.

[1174] Moreover, the polynucleotide sequences of the present invention can be engineered using methods generally known in the art in order to alter polypeptide encoding sequences for a variety of reasons, including but not limited to, alterations which modify the cloning, processing, and/or expression of the gene product. For example, DNA shuffling by random fragmentation and PCR reassembly of gene fragments and synthetic oligonucleotides may be used to engineer the nucleotide sequences. In addition, site-directed mutagenesis may be used to insert new restriction sites, alter glycosylation patterns, change codon preference, produce splice variants, or introduce mutations, and so forth.

[1175] In another embodiment of the invention, natural, modified, or recombinant nucleic acid sequences may be ligated to a heterologous sequence to encode a fusion protein. For example, to screen peptide libraries for inhibitors of polypeptide activity, it may be useful to encode a chimeric protein that can be recognized by a commercially available antibody. A fusion protein may also be engineered to contain a cleavage site located between the polypeptide-encoding sequence and the heterologous protein sequence, so that the polypeptide may be cleaved and purified away from the heterologous moiety.

[1176] Sequences encoding a desired polypeptide may be synthesized, in whole or in part, using chemical methods well known in the art (see Caruthers, M. H. et al. (1980) Nucl. Acids Res. Symp. Ser. 215-223, Horn, T. et al. (1980) Nucl. Acids Res. Symp. Ser. 225-232). Alternatively, the protein itself may be produced using chemical methods to synthesize the amino acid sequence of a polypeptide, or a portion thereof. For example, peptide synthesis can be performed using various solid-phase techniques (Roberge, J. Y. et al. (1995) Science 269:202-204) and automated synthesis may be achieved, for example, using the ABI 431A Peptide Synthesizer (Perkin Elmer, Palo Alto, Calif.).

[1177] A newly synthesized peptide may be substantially purified by preparative high performance liquid chromatography (e.g., Creighton, T. (1983) Proteins, Structures and Molecular Principles, W H Freeman and Co., New York, N.Y.) or other comparable techniques available in the art. The composition of the synthetic peptides may be confirmed by amino acid analysis or sequencing (e.g., the Edman degradation procedure). Additionally, the amino acid sequence of a polypeptide, or any part thereof, may be altered during direct synthesis and/or combined using chemical methods with sequences from other proteins, or any part thereof, to produce a variant polypeptide.

[1178] In order to express a desired polypeptide, the nucleotide sequences encoding the polypeptide, or functional equivalents, may be inserted into appropriate expression vector, i.e., a vector which contains the necessary elements for the transcription and translation of the inserted coding sequence. Methods which are well known to those skilled in the art may be used to construct expression vectors containing sequences encoding a polypeptide of interest and appropriate transcriptional and translational control elements. These methods include in vitro recombinant DNA techniques, synthetic techniques, and in vivo genetic recombination. Such techniques are described, for example, in Sambrook, J. et al. (1989) Molecular Cloning, A Laboratory Manual, Cold Spring Harbor Press, Plainview, N.Y., and Ausubel, F. M. et al. (1989) Current Protocols in Molecular Biology, John Wiley & Sons, New York. N.Y.

[1179] A variety of expression vector/host systems may be utilized to contain and express polynucleotide sequences. These include, but are not limited to, microorganisms such as bacteria transformed with recombinant bacteriophage, plasmid, or cosmid DNA expression vectors; yeast transformed with yeast expression vectors; insect cell systems infected with virus expression vectors (e.g., baculovirus); plant cell systems transformed with virus expression vectors (e.g., cauliflower mosaic virus, CaMV; tobacco mosaic virus, TMV) or with bacterial expression vectors (e.g., Ti or pBR322 plasmids); or animal cell systems.

[1180] The “control elements” or “regulatory sequences” present in an expression vector are those non-translated regions of the vector—enhancers, promoters, 5′ and 3′ untranslated regions—which interact with host cellular proteins to carry out transcription and translation. Such elements may vary in their strength and specificity. Depending on the vector system and host utilized, any number of suitable transcription and translation elements, including constitutive and inducible promoters, may be used. For example, when cloning in bacterial systems, inducible promoters such as the hybrid lacZ promoter of the PBLUESCRIPT phagemid (Stratagene, La Jolla, Calif.) or PSPORT1 plasmid (Gibco BRL, Gaithersburg, Md.) and the like may be used. In mammalian cell systems, promoters from mammalian genes or from mammalian viruses are generally preferred. If it is necessary to generate a cell line that contains multiple copies of the sequence encoding a polypeptide, vectors based on SV40 or EBV may be advantageously used with an appropriate selectable marker.

[1181] In bacterial systems, any of a number of expression vectors may be selected depending upon the use intended for the expressed polypeptide. For example, when large quantities are needed, for example for the induction of antibodies, vectors which direct high level expression of fusion proteins that are readily purified may be used. Such vectors include, but are not limited to, the multifunctional E. coli cloning and expression vectors such as BLUESCRIPT (Stratagene), in which the sequence encoding the polypeptide of interest may be ligated into the vector in frame with sequences for the amino-terminal Met and the subsequent 7 residues of .beta.-galactosidase so that a hybrid protein is produced; pIN vectors (Van Heeke, G. and S. M. Schuster (1989) J. Biol. Chem. 264:5503-5509); and the like. pGEX Vectors (Promega, Madison, Wis.) may also be used to express foreign polypeptides as fusion proteins with glutathione S-transferase (GST). In general, such fusion proteins are soluble and can easily be purified from lysed cells by adsorption to glutathione-agarose beads followed by elution in the presence of free glutathione. Proteins made in such systems may be designed to include heparin, thrombin, or factor XA protease cleavage sites so that the cloned polypeptide of interest can be released from the GST moiety at will.

[1182] In the yeast, Saccharomyces cerevisiae, a number of vectors containing constitutive or inducible promoters such as alpha factor, alcohol oxidase, and PGH may be used. For reviews, see Ausubel et al. (supra) and Grant et al. (1987) Methods Enzymol. 153:516-544.

[1183] In cases where plant expression vectors are used, the expression of sequences encoding polypeptides may be driven by any of a number of promoters. For example, viral promoters such as the 35S and 19S promoters of CaMV may be used alone or in combination with the omega leader sequence from TMV (Takamatsu, N. (1987) EMBO J. 6:307-311. Alternatively, plant promoters such as the small subunit of RUBISCO or heat shock promoters may be used (Coruzzi, G. et al. (1984) EMBO J. 3:1671-1680; Broglie, R. et al. (1984) Science 224:838-843; and Winter, J. et al. (1991) Results Probl. Cell Differ. 17:85-105). These constructs can be introduced into plant cells by direct DNA transformation or pathogen-mediated transfection. Such techniques are described in a number of generally available reviews (see, for example, Hobbs, S. or Murry, L. E. in McGraw Hill Yearbook of Science and Technology (1992) McGraw Hill, New York, N.Y.; pp. 191-196).

[1184] An insect system may also be used to express a polypeptide of interest. For example, in one such system, Autographa californica nuclear polyhedrosis virus (AcNPV) is used as a vector to express foreign genes in Spodoptera frugiperda cells or in Trichoplusia larvae. The sequences encoding the polypeptide may be cloned into a non-essential region of the virus, such as the polyhedrin gene, and placed under control of the polyhedrin promoter. Successful insertion of the polypeptide-encoding sequence will render the polyhedrin gene inactive and produce recombinant virus lacking coat protein. The recombinant viruses may then be used to infect, for example, S. frugiperda cells or Trichoplusia larvae in which the polypeptide of interest may be expressed (Engelhard, E. K. et al. (1994) Proc. Natl. Acad. Sci. 91:3224-3227).

[1185] In mammalian host cells, a number of viral-based expression systems are generally available. For example, in cases where an adenovirus is used as an expression vector, sequences encoding a polypeptide of interest may be ligated into an adenovirus transcription/translation complex consisting of the late promoter and tripartite leader sequence. Insertion in a non-essential E1 or E3 region of the viral genome may be used to obtain a viable virus which is capable of expressing the polypeptide in infected host cells (Logan, J. and Shenk, T. (1984) Proc. Natl. Acad. Sci. 81:3655-3659). In addition, transcription enhancers, such as the Rous sarcoma virus (RSV) enhancer, may be used to increase expression in mammalian host cells.

[1186] Specific initiation signals may also be used to achieve more efficient translation of sequences encoding a polypeptide of interest. Such signals include the ATG initiation codon and adjacent sequences. In cases where sequences encoding the polypeptide, its initiation codon, and upstream sequences are inserted into the appropriate expression vector, no additional transcriptional or translational control signals may be needed. However, in cases where only coding sequence, or a portion thereof, is inserted, exogenous translational control signals including the ATG initiation codon should be provided. Furthermore, the initiation codon should be in the correct reading frame to ensure translation of the entire insert. Exogenous translational elements and initiation codons may be of various origins, both natural and synthetic. The efficiency of expression may be enhanced by the inclusion of enhancers which are appropriate for the particular cell system which is used, such as those described in the literature (Scharf, D. et al. (1994) Results Probl. Cell Differ. 20:125-162).

[1187] In addition, a host cell strain may be chosen for its ability to modulate the expression of the inserted sequences or to process the expressed protein in the desired fashion. Such modifications of the polypeptide include, but are not limited to, acetylation, carboxylation, glycosylation, phosphorylation, lipidation, and acylation. Post-translational processing which cleaves a “prepro” form of the protein may also be used to facilitate correct insertion, folding and/or function. Different host cells such as CHO, COS, HeLa, MDCK, HEK293, and WI38, which have specific cellular machinery and characteristic mechanisms for such post-translational activities, may be chosen to ensure the correct modification and processing of the foreign protein.

[1188] For long-term, high-yield production of recombinant proteins, stable expression is generally preferred. For example, cell lines which stably express a polynucleotide of interest may be transformed using expression vectors which may contain viral origins of replication and/or endogenous expression elements and a selectable marker gene on the same or on a separate vector. Following the introduction of the vector, cells may be allowed to grow for 1-2 days in an enriched media before they are switched to selective media. The purpose of the selectable marker is to confer resistance to selection, and its presence allows growth and recovery of cells which successfully express the introduced sequences. Resistant clones of stably transformed cells may be proliferated using tissue culture techniques appropriate to the cell type.

[1189] Any number of selection systems may be used to recover transformed cell lines. These include, but are not limited to, the herpes simplex virus thymidine kinase (Wigler, M. et al. (1977) Cell 11:223-32) and adenine phosphoribosyltransferase (Lowy, I. et al. (1990) Cell 22:817-23) genes which can be employed in tk.sup.- or aprt.sup.-cells, respectively. Also, antimetabolite, antibiotic or herbicide resistance can be used as the basis for selection; for example, dhfr which confers resistance to methotrexate (Wigler, M. et al. (1980) Proc. Natl. Acad. Sci. 77:3567-70); npt, which confers resistance to the aminoglycosides, neomycin and G-418 (Colbere-Garapin, F. et al (1981) J. Mol. Biol. 150:1-14); and als or pat, which confer resistance to chlorsulfuron and phosphinotricin acetyltransferase, respectively (Murry, supra). Additional selectable genes have been described, for example, trpB, which allows cells to utilize indole in place of tryptophan, or hisD, which allows cells to utilize histinol in place of histidine (Hartman, S. C. and R. C. Mulligan (1988) Proc. Natl. Acad. Sci. 85:8047-51). The use of visible markers has gained popularity with such markers as anthocyanins, beta-glucuronidase and its substrate GUS, and luciferase and its substrate luciferin, being widely used not only to identify transformants, but also to quantify the amount of transient or stable protein expression attributable to a specific vector system (Rhodes, C. A. et al. (1995) Methods Mol. Biol. 55:121-131).

[1190] Although the presence/absence of marker gene expression suggests that the gene of interest is also present, its presence and expression may need to be confirmed. For example, if the sequence encoding a polypeptide is inserted within a marker gene sequence, recombinant cells containing sequences can be identified by the absence of marker gene function. Alternatively, a marker gene can be placed in tandem with a polypeptide-encoding sequence under the control of a single promoter. Expression of the marker gene in response to induction or selection usually indicates expression of the tandem gene as well.

[1191] Alternatively, host cells that contain and express a desired polynucleotide sequence may be identified by a variety of procedures known to those of skill in the art. These procedures include, but are not limited to, DNA-DNA or DNA-RNA hybridizations and protein bioassay or immunoassay techniques which include, for example, membrane, solution, or chip based technologies for the detection and/or quantification of nucleic acid or protein.

[1192] A variety of protocols for detecting and measuring the expression of polynucleotide-encoded products, using either polyclonal or monoclonal antibodies specific for the product are known in the art. Examples include enzyme-linked immunosorbent assay (ELISA), radioimmunoassay (RIA), and fluorescence activated cell sorting (FACS). A two-site, monoclonal-based immunoassay utilizing monoclonal antibodies reactive to two non-interfering epitopes on a given polypeptide may be preferred for some applications, but a competitive binding assay may also be employed. These and other assays are described, among other places, in Hampton, R. et al. (1990; Serological Methods, a Laboratory Manual, APS Press, St Paul. Minn.) and Maddox, D. E. et al. (1983; J. Exp. Med. 158:1211-1216).

[1193] A wide variety of labels and conjugation techniques are known by those skilled in the art and may be used in various nucleic acid and amino acid assays. Means for producing labeled hybridization or PCR probes for detecting sequences related to polynucleotides include oligolabeling, nick translation, end-labeling or PCR amplification using a labeled nucleotide. Alternatively, the sequences, or any portions thereof may be cloned into a vector for the production of an mRNA probe. Such vectors are known in the art, are commercially available, and may be used to synthesize RNA probes in vitro by addition of an appropriate RNA polymerase such as T7, T3, or SP6 and labeled nucleotides. These procedures may be conducted using a variety of commercially available kits. Suitable reporter molecules or labels, which may be used include radionuclides, enzymes, fluorescent, chemiluminescent, or chromogenic agents as well as substrates, cofactors, inhibitors, magnetic particles, and the like.

[1194] Host cells transformed with a polynucleotide sequence of interest may be cultured under conditions suitable for the expression and recovery of the protein from cell culture. The protein produced by a recombinant cell may be secreted or contained intracellularly depending on the sequence and/or the vector used. As will be understood by those of skill in the art, expression vectors containing polynucleotides of the invention may be designed to contain signal sequences which direct secretion of the encoded polypeptide through a prokaryotic or eukaryotic cell membrane. Other recombinant constructions may be used to join sequences encoding a polypeptide of interest to nucleotide sequence encoding a polypeptide domain which will facilitate purification of soluble proteins. Such purification facilitating domains include, but are not limited to, metal chelating peptides such as histidine-tryptophan modules that allow purification on immobilized metals, protein A domains that allow purification on immobilized immunoglobulin, and the domain utilized in the FLAGS extension/affinity purification system (Immunex Corp., Seattle, Wash.). The inclusion of cleavable linker sequences such as those specific for Factor XA or enterokinase (Invitrogen. San Diego, Calif.) between the purification domain and the encoded polypeptide may be used to facilitate purification. One such expression vector provides for expression of a fusion protein containing a polypeptide of interest and a nucleic acid encoding 6 histidine residues preceding a thioredoxin or an enterokinase cleavage site. The histidine residues facilitate purification on IMIAC (immobilized metal ion affinity chromatography) as described in Porath, J. et al. (1992, Prot. Exp. Purif. 3:263-281) while the enterokinase cleavage site provides a means for purifying the desired polypeptide from the fusion protein. A discussion of vectors which contain fusion proteins is provided in Kroll, D. J. et al. (1993; DNA Cell Biol. 12:441-453).

[1195] In addition to recombinant production methods, polypeptides of the invention, and fragments thereof, may be produced by direct peptide synthesis using solid-phase techniques (Merrifield J. (1963) J. Am. Chem. Soc. 85:2149-2154). Protein synthesis may be performed using manual techniques or by automation. Automated synthesis may be achieved, for example, using Applied Biosystems 431A Peptide Synthesizer (Perkin Elmer). Alternatively, various fragments may be chemically synthesized separately and combined using chemical methods to produce the full length molecule.

[1196] Antibody Compositions Fragments thereof and other Binding Agents

[1197] According to another aspect, the present invention further provides binding agents, such as antibodies and antigen-binding fragments thereof, that exhibit immunological binding to a tumor polypeptide disclosed herein, or to a portion, variant or derivative thereof. An antibody, or antigen-binding fragment thereof, is said to “specifically bind,” “immunogically bind,” and/or is “immunologically reactive” to a polypeptide of the invention if it reacts at a detectable level (within, for example, an ELISA assay) with the polypeptide, and does not react detectably with unrelated polypeptides under similar conditions.

[1198] Immunological binding, as used in this context, generally refers to the non-covalent interactions of the type which occur between an immunoglobulin molecule and an antigen for which the immunoglobulin is specific. The strength, or affinity of immunological binding interactions can be expressed in terms of the dissociation constant (K_{d}) of the interaction, wherein a smaller K_{d} represents a greater affinity. Immunological binding properties of selected polypeptides can be quantified using methods well known in the art. One such method entails measuring the rates of antigen-binding site/antigen complex formation and dissociation, wherein those rates depend on the concentrations of the complex partners, the affinity of the interaction, and on geometric parameters that equally influence the rate in both directions. Thus, both the “on rate constant” (Kₒₙ) and the “off rate constant” (K_{off}) can be determined by calculation of the concentrations and the actual rates of association and dissociation. The ratio of K_{off}/Kₒₙ enables cancellation of all parameters not related to affinity, and is thus equal to the dissociation constant K_{d}. See, generally, Davies et al. (1990) Annual Rev. Biochem. 59:439-473.

[1199] An “antigen-binding site,” or “binding portion” of an antibody refers to the part of the immunoglobulin molecule that participates in antigen binding. The antigen binding site is formed by amino acid residues of the N-terminal variable (“V”) regions of the heavy (“H”) and light (“L”) chains. Three highly divergent stretches within the V regions of the heavy and light chains are referred to as “hypervariable regions” which are interposed between more conserved flanking stretches known as “framework regions,” or “FRs”. Thus the term “FR” refers to amino acid sequences which are naturally found between and adjacent to hypervariable regions in immunoglobulins. In an antibody molecule, the three hypervariable regions of a light chain and the three hypervariable regions of a heavy chain are disposed relative to each other in three dimensional space to form an antigen-binding surface. The antigen-binding surface is complementary to the three-dimensional surface of a bound antigen, and the three hypervariable regions of each of the heavy and light chains are referred to as “complementarity-determining regions,” or “CDRs.”

[1200] Binding agents may be further capable of differentiating between patients with and without a cancer, such as lung cancer, using the representative assays provided herein. For example, antibodies or other binding agents that bind to a tumor protein will preferably generate a signal indicating the presence of a cancer in at least about 20% of patients with the disease, more preferably at least about 30% of patients. Alternatively, or in addition, the antibody will generate a negative signal indicating the absence of the disease in at least about 90% of individuals without the cancer. To determine whether a binding agent satisfies this requirement, biological samples (e.g., blood, sera, sputum, urine and/or tumor biopsies) from patients with and without a cancer (as determined using standard clinical tests) may be assayed as described herein for the presence of polypeptides that bind to the binding agent. Preferably, a statistically significant number of samples with and without the disease will be assayed. Each binding agent should satisfy the above criteria; however, those of ordinary skill in the art will recognize that binding agents may be used in combination to improve sensitivity.

[1201] Any agent that satisfies the above requirements may be a binding agent. For example, a binding agent may be a ribosome, with or without a peptide component, an RNA molecule or a polypeptide. In a preferred embodiment, a binding agent is an antibody or an antigen-binding fragment thereof. Antibodies may be prepared by any of a variety of techniques known to those of ordinary skill in the art. See, e.g., Harlow and Lane, Antibodies: A Laboratory Manual, Cold Spring Harbor Laboratory, 1988. In general, antibodies can be produced by cell culture techniques, including the generation of monoclonal antibodies as described herein, or via transfection of antibody genes into suitable bacterial or mammalian cell hosts, in order to allow for the production of recombinant antibodies. In one technique, an immunogen comprising the polypeptide is initially injected into any of a wide variety of mammals (e.g., mice, rats, rabbits, sheep or goats). In this step, the polypeptides of this invention may serve as the immunogen without modification. Alternatively, particularly for relatively short polypeptides, a superior immune response may be elicited if the polypeptide is joined to a carrier protein, such as bovine serum albumin or keyhole limpet hemocyanin. The immunogen is injected into the animal host, preferably according to a predetermined schedule incorporating one or more booster immunizations, and the animals are bled periodically. Polyclonal antibodies specific for the polypeptide may then be purified from such antisera by, for example, affinity chromatography using the polypeptide coupled to a suitable solid support.

[1202] Monoclonal antibodies specific for an antigenic polypeptide of interest may be prepared, for example, using the technique of Kohler and Milstein, Eur. J. Immunol. 6:511-519, 1976, and improvements thereto. Briefly, these methods involve the preparation of immortal cell lines capable of producing antibodies having the desired specificity (i.e., reactivity with the polypeptide of interest). Such cell lines may be produced, for example, from spleen cells obtained from an animal immunized as described above. The spleen cells are then immortalized by, for example, fusion with a myeloma cell fusion partner, preferably one that is syngeneic with the immunized animal. A variety of fusion techniques may be employed. For example, the spleen cells and myeloma cells may be combined with a nonionic detergent for a few minutes and then plated at low density on a selective medium that supports the growth of hybrid cells, but not myeloma cells. A preferred selection technique uses HAT (hypoxanthine, aminopterin, thymidine) selection. After a sufficient time, usually about 1 to 2 weeks, colonies of hybrids are observed. Single colonies are selected and their culture supernatants tested for binding activity against the polypeptide. Hybridomas having high reactivity and specificity are preferred.

[1203] Monoclonal antibodies may be isolated from the supernatants of growing hybridoma colonies. In addition, various techniques may be employed to enhance the yield, such as injection of the hybridoma cell line into the peritoneal cavity of a suitable vertebrate host, such as a mouse. Monoclonal antibodies may then be harvested from the ascites fluid or the blood. Contaminants may be removed from the antibodies by conventional techniques, such as chromatography, gel filtration, precipitation, and extraction. The polypeptides of this invention may be used in the purification process in, for example, an affinity chromatography step.

[1204] A number of therapeutically useful molecules are known in the art which comprise antigen-binding sites that are capable of exhibiting immunological binding properties of an antibody molecule. The proteolytic enzyme papain preferentially cleaves IgG molecules to yield several fragments, two of which (the “F(ab)” fragments) each comprise a covalent heterodimer that includes an intact antigen-binding site. The enzyme pepsin is able to cleave IgG molecules to provide several fragments, including the “F(ab′)₂” fragment which comprises both antigen-binding sites. An “Fv” fragment can be produced by preferential proteolytic cleavage of an IgM, and on rare occasions IgG or IgA immunoglobulin molecule. Fv fragments are, however, more commonly derived using recombinant techniques known in the art. The Fv fragment includes a non-covalent V_{H}::V_{L} heterodimer including an antigen-binding site which retains much of the antigen recognition and binding capabilities of the native antibody molecule. Inbar et al. (1972) Proc. Nat. Acad. Sci. USA 69:2659-2662; Hochman et al. (1976) Biochem 15:2706-2710; and Ehrlich et al. (1980) Biochem 19:4091-4096.

[1205] A single chain Fv (“sFv”) polypeptide is a covalently linked V_{H}::V_{L} heterodimer which is expressed from a gene fusion including V_{H}- and V_{L}-encoding genes linked by a peptide-encoding linker. Huston et al. (1988) Proc. Nat. Acad. Sci. USA 85(16):5879-5883. A number of methods have been described to discern chemical structures for converting the naturally aggregated—but chemically separated—light and heavy polypeptide chains from an antibody V region into an sFv molecule which will fold into a three dimensional structure substantially similar to the structure of an antigen-binding site. See, e.g., U.S. Pat. Nos. 5,091,513 and 5,132,405, to Huston et al.; and U.S. Pat. No. 4,946,778, to Ladner et al.

[1206] Each of the above-described molecules includes a heavy chain and a light chain CDR set, respectively interposed between a heavy chain and a light chain FR set which provide support to the CDRS and define the spatial relationship of the CDRs relative to each other. As used herein, the term “CDR set” refers to the three hypervariable regions of a heavy or light chain V region. Proceeding from the N-terminus of a heavy or light chain, these regions are denoted as “CDR1,” “CDR2,” and “CDR3” respectively. An antigen-binding site, therefore, includes six CDRs, comprising the CDR set from each of a heavy and a light chain V region. A polypeptide comprising a single CDR, (e.g., a CDR1, CDR2 or CDR3) is referred to herein as a “molecular recognition unit.” Crystallographic analysis of a number of antigen-antibody complexes has demonstrated that the amino acid residues of CDRs form extensive contact with bound antigen, wherein the most extensive antigen contact is with the heavy chain CDR3. Thus, the molecular recognition units are primarily responsible for the specificity of an antigen-binding site.

[1207] As used herein, the term “FR set” refers to the four flanking amino acid sequences which frame the CDRs of a CDR set of a heavy or light chain V region. Some FR residues may contact bound antigen; however, FRs are primarily responsible for folding the V region into the antigen-binding site, particularly the FR residues directly adjacent to the CDRS. Within FRs, certain amino residues and certain structural features are very highly conserved. In this regard, all V region sequences contain an internal disulfide loop of around 90 amino acid residues. When the V regions fold into a binding-site, the CDRs are displayed as projecting loop motifs which form an antigen-binding surface. It is generally recognized that there are conserved structural regions of FRs which influence the folded shape of the CDR loops into certain “canonical” structures—regardless of the precise CDR amino acid sequence. Further, certain FR residues are known to participate in non-covalent interdomain contacts which stabilize the interaction of the antibody heavy and light chains.

[1208] A number of “humanized” antibody molecules comprising an antigen-binding site derived from a non-human immunoglobulin have been described, including chimeric antibodies having rodent V regions and their associated CDRs fused to human constant domains (Winter et al. (1991) Nature 349:293-299; Lobug io et al. (1989) Proc. Nat. Acad. Sci. USA 86:4220-4224; Shaw et al. (1987) J Immunol. 138:4534-4538; and Brown et al. (1987) Cancer Res. 47:3577-3583), rodent CDRs grafted into a human supporting FR prior to fusion with an appropriate human antibody constant domain (Riechmann et al. (1988) Nature 332:323-327; Verhoeyen et al. (1988) Science 239:1534-1536; and Jones et al. (1986) Nature 321:522-525), and rodent CDRs supported by recombinantly veneered rodent FRs (European Patent Publication No. 519,596, published Dec. 23, 1992). These “humanized” molecules are designed to minimize unwanted immunological response toward rodent antihuman antibody molecules which limits the duration and effectiveness of therapeutic applications of those moieties in human recipients.

[1209] As used herein, the terms “veneered FRs” and “recombinantly veneered FRs” refer to the selective replacement of FR residues from, e.g., a rodent heavy or light chain V region, with human FR residues in order to provide a xenogeneic molecule comprising an antigen-binding site which retains substantially all of the native FR polypeptide folding structure. Veneering techniques are based on the understanding that the ligand binding characteristics of an antigen-binding site are determined primarily by the structure and relative disposition of the heavy and light chain CDR sets within the antigen-binding surface. Davies et al. (1990) Ann. Rev. Biochem. 59:439-473. Thus, antigen binding specificity can be preserved in a humanized antibody only wherein the CDR structures, their interaction with each other, and their interaction with the rest of the V region domains are carefully maintained. By using veneering techniques, exterior (e.g., solvent-accessible) FR residues which are readily encountered by the immune system are selectively replaced with human residues to provide a hybrid molecule that comprises either a weakly immunogenic, or substantially non-immunogenic veneered surface.

[1210] The process of veneering makes use of the available sequence data for human antibody variable domains compiled by Kabat et al., in Sequences of Proteins of Immunological Interest, 4th ed., (U.S. Dept. of Health and Human Services, U.S. Government Printing Office, 1987), updates to the Kabat database, and other accessible U.S. and foreign databases (both nucleic acid and protein). Solvent accessibilities of V region amino acids can be deduced from the known three-dimensional structure for human and murine antibody fragments. There are two general steps in veneering a murine antigen-binding site. Initially, the FRs of the variable domains of an antibody molecule of interest are compared with corresponding FR sequences of human variable domains obtained from the above-identified sources. The most homologous human V regions are then compared residue by residue to corresponding murine amino acids. The residues in the murine FR which differ from the human counterpart are replaced by the residues present in the human moiety using recombinant techniques well known in the art. Residue switching is only carried out with moieties which are at least partially exposed (solvent accessible), and care is exercised in the replacement of amino acid residues which may have a significant effect on the tertiary structure of V region domains, such as proline, glycine and charged amino acids.

[1211] In this manner, the resultant “veneered” murine antigen-binding sites are thus designed to retain the murine CDR residues, the residues substantially adjacent to the CDRs, the residues identified as buried or mostly buried (solvent inaccessible), the residues believed to participate in non-covalent (e.g., electrostatic and hydrophobic) contacts between heavy and light chain domains, and the residues from conserved structural regions of the FRs which are believed to influence the “canonical” tertiary structures of the CDR loops. These design criteria are then used to prepare recombinant nucleotide sequences which combine the CDRs of both the heavy and light chain of a murine antigen-binding site into human-appearing FRs that can be used to transfect mammalian cells for the expression of recombinant human antibodies which exhibit the antigen specificity of the murine antibody molecule.

[1212] In another embodiment of the invention, monoclonal antibodies of the present invention may be coupled to one or more therapeutic agents. Suitable agents in this regard include radionuclides, differentiation inducers, drugs, toxins, and derivatives thereof. Preferred radionuclides include ⁹⁰Y, ¹²³I, ¹²⁵I, ¹³¹I, ¹⁸⁶Re, ¹⁸⁸Re, ²¹¹At, and ²¹²Bi. Preferred drugs include methotrexate, and pyrimidine and purine analogs. Preferred differentiation inducers include phorbol esters and butyric acid. Preferred toxins include ricin, abrin, diptheria toxin, cholera toxin, gelonin, Pseudomonas exotoxin, Shigella toxin, and pokeweed antiviral protein.

[1213] A therapeutic agent may be coupled (e.g., covalently bonded) to a suitable monoclonal antibody either directly or indirectly (e.g., via a linker group). A direct reaction between an agent and an antibody is possible when each possesses a substituent capable of reacting with the other. For example, a nucleophilic group, such as an amino or sulfhydryl group, on one may be capable of reacting with a carbonyl-containing group, such as an anhydride or an acid halide, or with an alkyl group containing a good leaving group (e.g. a halide) on the other.

[1214] Alternatively, it may be desirable to couple a therapeutic agent and an antibody via a linker group. A linker group can function as a spacer to distance an antibody from an agent in order to avoid interference with binding capabilities. A linker group can also serve to increase the chemical reactivity of a substituent on an agent or an antibody, and thus increase the coupling efficiency. An increase in chemical reactivity may also facilitate the use of agents, or functional groups on agents, which otherwise would not be possible.

[1215] It will be evident to those skilled in the art that a variety of bifunctional or polyfunctional reagents, both homo- and hetero-functional (such as those described in the catalog of the Pierce Chemical Co., Rockford, Ill.), may be employed as the linker group. Coupling may be effected, for example, through amino groups, carboxyl groups, sulfhydryl groups or oxidized carbohydrate residues. There are numerous references describing such methodology, e.g., U.S. Pat. No. 4,671,958, to Rodwell et al.

[1216] Where a therapeutic agent is more potent when free from the antibody portion of the immunoconjugates of the present invention, it may be desirable to use a linker group which is cleavable during or upon internalization into a cell. A number of different cleavable linker groups have been described. The mechanisms for the intracellular release of an agent from these linker groups include cleavage by reduction of a disulfide bond (e.g., U.S. Pat. No. 4,489,710, to Spitler), by irradiation of a photolabile bond (e.g., U.S. Pat. No. 4,625,014, to Senter et al.), by hydrolysis of derivatized amino acid side chains (e.g., U.S. Pat. No. 4,638,045, to Kohn et al.), by serum complement-mediated hydrolysis (e.g., U.S. Pat. No. 4,671,958, to Rodwell et al.), and acid-catalyzed hydrolysis (e.g., U.S. Pat. No. 4,569,789, to Blattler et al.).

[1217] It may be desirable to couple more than one agent to an antibody. In one embodiment, multiple molecules of an agent are coupled to one antibody molecule. In another embodiment, more than one type of agent may be coupled to one antibody. Regardless of the particular embodiment, immunoconjugates with more than one agent may be prepared in a variety of ways. For example, more than one agent may be coupled directly to an antibody molecule, or linkers that provide multiple sites for attachment can be used. Alternatively, a carrier can be used.

[1218] A carrier may bear the agents in a variety of ways, including covalent bonding either directly or via a linker group. Suitable carriers include proteins such as albumins (e.g., U.S. Pat. No. 4,507,234, to Kato et al.), peptides and polysaccharides such as aminodextran (e.g., U.S. Pat. No. 4,699,784, to Shih et al.). A carrier may also bear an agent by noncovalent bonding or by encapsulation, such as within a liposome vesicle (e.g., U.S. Pat. Nos. 4,429,008 and 4,873,088). Carriers specific for radionuclide agents include radiohalogenated small molecules and chelating compounds. For example, U.S. Pat. No. 4,735,792 discloses representative radiohalogenated small molecules and their synthesis. A radionuclide chelate may be formed from chelating compounds that include those containing nitrogen and sulfur atoms as the donor atoms for binding the metal, or metal oxide, radionuclide. For example, U.S. Pat. No. 4,673,562, to Davison et al. discloses representative chelating compounds and their synthesis.

[1219] T Cell Compositions

[1220] The present invention, in another aspect, provides T cells specific for a tumor polypeptide disclosed herein, or for a variant or derivative thereof. Such cells may generally be prepared in vitro or ex vivo, using standard procedures. For example, T cells may be isolated from bone marrow, peripheral blood, or a fraction of bone marrow or peripheral blood of a patient, using a commercially available cell separation system, such as the Isolex™ System, available from Nexell Therapeutics, Inc. (Irvine, Calif.; see also U.S. Pat. No. 5,240,856; U.S. Pat. No. 5,215,926; WO 89/06280; WO 91/16116 and WO 92/07243). Alternatively, T cells may be derived from related or unrelated humans, non-human mammals, cell lines or cultures.

[1221] T cells may be stimulated with a polypeptide, polynucleotide encoding a polypeptide and/or an antigen presenting cell (APC) that expresses such a polypeptide. Such stimulation is performed under conditions and for a time sufficient to permit the generation of T cells that are specific for the polypeptide of interest. Preferably, a tumor polypeptide or polynucleotide of the invention is present within a delivery vehicle, such as a microsphere, to facilitate the generation of specific T cells.

[1222] T cells are considered to be specific for a polypeptide of the present invention if the T cells specifically proliferate, secrete cytokines or kill target cells coated with the polypeptide or expressing a gene encoding the polypeptide. T cell specificity may be evaluated using any of a variety of standard techniques. For example, within a chromium release assay or proliferation assay, a stimulation index of more than two fold increase in lysis and/or proliferation, compared to negative controls, indicates T cell specificity. Such assays may be performed, for example, as described in Chen et al., Cancer Res. 54:1065-1070, 1994. Alternatively, detection of the proliferation of T cells may be accomplished by a variety of known techniques. For example, T cell proliferation can be detected by measuring an increased rate of DNA synthesis (e.g., by pulse-labeling cultures of T cells with tritiated thymidine and measuring the amount of tritiated thymidine incorporated into DNA). Contact with a tumor polypeptide (100 ng/ml-100 μg/ml, preferably 200 ng/ml-25 μg/ml) for 3-7 days will typically result in at least a two fold increase in proliferation of the T cells. Contact as described above for 2-3 hours should result in activation of the T cells, as measured using standard cytokine assays in which a two fold increase in the level of cytokine release (e.g., TNF or IFN-γ) is indicative of T cell activation (see Coligan et al., Current Protocols in Immunology, vol. 1, Wiley Interscience (Greene 1998)). T cells that have been activated in response to a tumor polypeptide, polynucleotide or polypeptide-expressing APC may be CD4⁺ and/or CD8⁺. Tumor polypeptide-specific T cells may be expanded using standard techniques. Within preferred embodiments, the T cells are derived from a patient, a related donor or an unrelated donor, and are administered to the patient following stimulation and expansion.

[1223] For therapeutic purposes, CD4⁺ or CD8⁺ T cells that proliferate in response to a tumor polypeptide, polynucleotide or APC can be expanded in number either in vitro or in vivo. Proliferation of such T cells in vitro may be accomplished in a variety of ways. For example, the T cells can be re-exposed to a tumor polypeptide, or a short peptide corresponding to an immunogenic portion of such a polypeptide, with or without the addition of T cell growth factors, such as interleukin-2, and/or stimulator cells that synthesize a tumor polypeptide. Alternatively, one or more T cells that proliferate in the presence of the tumor polypeptide can be expanded in number by cloning. Methods for cloning cells are well known in the art, and include limiting dilution.

[1224] T Cell Receptor Compositions

[1225] The T cell receptor (TCR) consists of 2 different, highly variable polypeptide chains, termed the T-cell receptor α and β chains, that are linked by a disulfide bond (Janeway, Travers, Walport. Immunobiology. Fourth Ed., 148-159. Elsevier Science Ltd/Garland Publishing. 1999). The α/β heterodimer complexes with the invariant CD3 chains at the cell membrane. This complex recognizes specific antigenic peptides bound to MHC molecules. The enormous diversity of TCR specificities is generated much like immunoglobulin diversity, through somatic gene rearrangement. The β chain genes contain over 50 variable (V), 2 diversity (D), over 10 joining (J) segments, and 2 constant region segments (C). The α chain genes contain over 70 V segments, and over 60 J segments but no D segments, as well as one C segment. During T cell development in the thymus, the D to J gene rearrangement of the β chain occurs, followed by the V gene segment rearrangement to the DJ. This functional VDJ_{β} exon is transcribed and spliced to join to a C_{β}. For the α chain, a V_{α} gene segment rearranges to a J_{α} gene segment to create the functional exon that is then transcribed and spliced to the C_{α}. Diversity is further increased during the recombination process by the random addition of P and N-nucleotides between the V, D, and J segments of the β chain and between the V and J segments in the α chain (Janeway, Travers, Walport. Immunobiology. Fourth Ed., 98 and 150. Elsevier Science Ltd/Garland Publishing. 1999).

[1226] The present invention, in another aspect, provides TCRs specific for a polypeptide disclosed herein, or for a variant or derivative thereof. In accordance with the present invention, polynucleotide and amino acid sequences are provided for the V-J or V-D-J junctional regions or parts thereof for the alpha and beta chains of the T-cell receptor which recognize tumor polypeptides described herein. In general, this aspect of the invention relates to T-cell receptors which recognize or bind tumor polypeptides presented in the context of MHC. In a preferred embodiment the tumor antigens recognized by the T-cell receptors comprise a polypeptide of the present invention. For example, cDNA encoding a TCR specific for a_tumor peptide can be isolated from T cells specific for a tumor polypeptide using standard molecular biological and recombinant DNA techniques.

[1227] This invention further includes the T-cell receptors or analogs thereof having substantially the same function or activity as the T-cell receptors of this invention which recognize or bind tumor polypeptides. Such receptors include, but are not limited to, a fragment of the receptor, or a substitution, addition or deletion mutant of a T-cell receptor provided herein. This invention also encompasses polypeptides or peptides that are substantially homologous to the T-cell receptors provided herein or that retain substantially the same activity. The term “analog” includes any protein or polypeptide having an amino acid residue sequence substantially identical to the T-cell receptors provided herein in which one or more residues, preferably no more than 5 residues, more preferably no more than 25 residues have been conservatively substituted with a functionally similar residue and which displays the functional aspects of the T-cell receptor as described herein.

[1228] The present invention further provides for suitable mammalian host cells, for example, non-specific T cells, that are transfected with a polynucleotide encoding TCRs specific for a polypeptide described herein, thereby rendering the host cell specific for the polypeptide. The α and β chains of the TCR may be contained on separate expression vectors or alternatively, on a single expression vector that also contains an internal ribosome entry site (IRES) for cap-independent translation of the gene downstream of the IRES. Said host cells expressing TCRs specific for the polypeptide may be used, for example, for adoptive immunotherapy of lung cancer as discussed further below.

[1229] In further aspects of the present invention, cloned TCRs specific for a polypeptide recited herein may be used in a kit for the diagnosis of lung cancer. For example, the nucleic acid sequence or portions thereof, of tumor-specific TCRs can be used as probes or primers for the detection of expression of the rearranged genes encoding the specific TCR in a biological sample. Therefore, the present invention further provides for an assay for detecting messenger RNA or DNA encoding the TCR specific for a polypeptide. Pharmaceutical Compositions

[1230] In additional embodiments, the present invention concerns formulation of one or more of the polynucleotide, polypeptide, T-cell and/or antibody compositions disclosed herein in pharmaceutically-acceptable carriers for administration to a cell or an animal, either alone, or in combination with one or more other modalities of therapy.

[1231] It will be understood that, if desired, a composition as disclosed herein may be administered in combination with other agents as well, such as, e.g., other proteins or polypeptides or various pharmaceutically-active agents. In fact, there is virtually no limit to other components that may also be included, given that the additional agents do not cause a significant adverse effect upon contact with the target cells or host tissues. The compositions may thus be delivered along with various other agents as required in the particular instance. Such compositions may be purified from host cells or other biological sources, or alternatively may be chemically synthesized as described herein. Likewise, such compositions may further comprise substituted or derivatized RNA or DNA compositions.

[1232] Therefore, in another aspect of the present invention, pharmaceutical compositions are provided comprising one or more of the polynucleotide, polypeptide, antibody, and/or T-cell compositions described herein in combination with a physiologically acceptable carrier. In certain preferred embodiments, the pharmaceutical compositions of the invention comprise immunogenic polynucleotide and/or polypeptide compositions of the invention for use in prophylactic and theraputic vaccine applications. Vaccine preparation is generally described in, for example, M. F. Powell and M. J. Newman, eds., “Vaccine Design (the subunit and adjuvant approach),” Plenum Press (NY, 1995). Generally, such compositions will comprise one or more polynucleotide and/or polypeptide compositions of the present invention in combination with one or more immunostimulants.

[1233] It will be apparent that any of the pharmaceutical compositions described herein can contain pharmaceutically acceptable salts of the polynucleotides and polypeptides of the invention. Such salts can be prepared, for example, from pharmaceutically acceptable non-toxic bases, including organic bases (e.g., salts of primary, secondary and tertiary amines and basic amino acids) and inorganic bases (e.g., sodium, potassium, lithium, ammonium, calcium and magnesium salts).

[1234] In another embodiment, illustrative immunogenic compositions, e.g., vaccine compositions, of the present invention comprise DNA encoding one or more of the polypeptides as described above, such that the polypeptide is generated in situ. As noted above, the polynucleotide may be administered within any of a variety of delivery systems known to those of ordinary skill in the art. Indeed, numerous gene delivery techniques are well known in the art, such as those described by Rolland, Crit. Rev. Therap. Drug Carrier Systems 15:143-198, 1998, and references cited therein. Appropriate polynucleotide expression systems will, of course, contain the necessary regulatory DNA regulatory sequences for expression in a patient (such as a suitable promoter and terminating signal). Alternatively, bacterial delivery systems may involve the administration of a bacterium (such as Bacillus-Calmette-Guerrin) that expresses an immunogenic portion of the polypeptide on its cell surface or secretes such an epitope.

[1235] Therefore, in certain embodiments, polynucleotides encoding immunogenic polypeptides described herein are introduced into suitable mammalian host cells for expression using any of a number of known viral-based systems. In one illustrative embodiment, retroviruses provide a convenient and effective platform for gene delivery systems. A selected nucleotide sequence encoding a polypeptide of the present invention can be inserted into a vector and packaged in retroviral particles using techniques known in the art. The recombinant virus can then be isolated and delivered to a subject. A number of illustrative retroviral systems have been described (e.g., U.S. Pat. No. 5,219,740; Miller and Rosman (1989) BioTechniques 7:980-990; Miller, A. D. (1990) Human Gene Therapy 1:5-14; Scarpa et al. (1991) Virology 180:849-852; Burns et al. (1993) Proc. Natl. Acad. Sci. USA 90:8033-8037; and Boris-Lawrie and Temin (1993) Cur. Opin. Genet. Develop. 3:102-109.

[1236] In addition, a number of illustrative adenovirus-based systems have also been described. Unlike retroviruses which integrate into the host genome, adenoviruses persist extrachromosomally thus minimizing the risks associated with insertional mutagenesis (Haj-Ahmad and Graham (1986) J. Virol. 57:267-274; Bett et al. (1993) J. Virol. 67:5911-5921; Mittereder et al. (1994) Human Gene Therapy 5:717-729; Seth et al. (1994) J. Virol. 68:933-940; Barr et al. (1994) Gene Therapy 1:51-58; Berkner, K. L. (1988) BioTechniques 6:616-629; and Rich et al. (1993) Human Gene Therapy 4:461-476).

[1237] Various adeno-associated virus (AAV) vector systems have also been developed for polynucleotide delivery. AAV vectors can be readily constructed using techniques well known in the art. See, e.g., U.S. Pat. Nos. 5,173,414 and 5,139,941; International Publication Nos. WO 92/01070 and WO 93/03769; Lebkowski et al. (1988) Molec. Cell. Biol. 8:3988-3996; Vincent et al. (1990) Vaccines 90 (Cold Spring Harbor Laboratory Press); Carter, B. J. (1992) Current Opinion in Biotechnology 3:533-539; Muzyczka, N. (1992) Current Topics in Microbiol. and Immunol. 158:97-129; Kotin, R. M. (1994) Human Gene Therapy 5:793-801; Shelling and Smith (1994) Gene Therapy 1:165-169; and Zhou et al. (1994) J. Exp. Med. 179:1867-1875.

[1238] Additional viral vectors useful for delivering the polynucleotides encoding polypeptides of the present invention by gene transfer include those derived from the pox family of viruses, such as vaccinia virus and avian poxyirus. By way of example, vaccinia virus recombinants expressing the novel molecules can be constructed as follows. The DNA encoding a polypeptide is first inserted into an appropriate vector so that it is adjacent to a vaccinia promoter and flanking vaccinia DNA sequences, such as the sequence encoding thymidine kinase (TK). This vector is then used to transfect cells which are simultaneously infected with vaccinia. Homologous recombination serves to insert the vaccinia promoter plus the gene encoding the polypeptide of interest into the viral genome. The resulting TK.sup.(−) recombinant can be selected by culturing the cells in the presence of 5-bromodeoxyuridine and picking viral plaques resistant thereto.

[1239] A vaccinia-based infection/transfection system can be conveniently used to provide for inducible, transient expression or coexpression of one or more polypeptides described herein in host cells of an organism. In this particular system, cells are first infected in vitro with a vaccinia virus recombinant that encodes the bacteriophage T7 RNA polymerase. This polymerase displays exquisite specificity in that it only transcribes templates bearing T7 promoters. Following infection, cells are transfected with the polynucleotide or polynucleotides of interest, driven by a T7 promoter. The polymerase expressed in the cytoplasm from the vaccinia virus recombinant transcribes the transfected DNA into RNA which is then translated into polypeptide by the host translational machinery. The method provides for high level, transient, cytoplasmic production of large quantities of RNA and its translation products. See, e.g., Elroy-Stein and Moss, Proc. Natl. Acad. Sci. USA (1990) 87:6743-6747; Fuerst et al. Proc. Natl. Acad. Sci. USA (1986) 83:8122-8126.

[1240] Alternatively, avipoxyiruses, such as the fowlpox and canarypox viruses, can also be used to deliver the coding sequences of interest. Recombinant avipox viruses, expressing immunogens from mammalian pathogens, are known to confer protective immunity when administered to non-avian species. The use of an Avipox vector is particularly desirable in human and other mammalian species since members of the Avipox genus can only productively replicate in susceptible avian species and therefore are not infective in mammalian cells. Methods for producing recombinant Avipoxyiruses are known in the art and employ genetic recombination, as described above with respect to the production of vaccinia viruses. See, e.g., WO 91/12882; WO 89/03429; and WO 92/03545.

[1241] Any of a number of alphavirus vectors can also be used for delivery of polynucleotide compositions of the present invention, such as those vectors described in U.S. Pat. Nos. 5,843,723; 6,015,686; 6,008,035 and 6,015,694. Certain vectors based on Venezuelan Equine Encephalitis (VEE) can also be used, illustrative examples of which can be found in U.S. Pat. Nos. 5,505,947 and 5,643,576.

[1242] Moreover, molecular conjugate vectors, such as the adenovirus chimeric vectors described in Michael et al. J. Biol. Chem. (1993) 268:6866-6869 and Wagner et al. Proc. Natl. Acad. Sci. USA (1992) 89:6099-6103, can also be used for gene delivery under the invention.

[1243] Additional illustrative information on these and other known viral-based delivery systems can be found, for example, in Fisher-Hoch et al., Proc. Natl. Acad. Sci. USA 86:317-321, 1989; Flexner et al., Ann. N.Y. Acad. Sci. 569:86-103, 1989; Flexner et al., Vaccine 8:17-21, 1990; U.S. Pat. Nos. 4,603,112, 4,769,330, and 5,017,487; WO 89/01973; U.S. Pat. No. 4,777,127; GB 2,200,651; EP 0,345,242; WO 91/02805; Berkner, Biotechniques 6:616-627, 1988; Rosenfeld et al., Science 252:431-434, 1991; Kolls et al., Proc. Natl. Acad. Sci. USA 91:215-219, 1994; Kass-Eisler et al., Proc. Natl. Acad. Sci. USA 90:11498-11502, 1993; Guzman et al., Circulation 88:2838-2848, 1993; and Guzman et al., Cir. Res. 73:1202-1207, 1993.

[1244] In certain embodiments, a polynucleotide may be integrated into the genome of a target cell. This integration may be in the specific location and orientation via homologous recombination (gene replacement) or it may be integrated in a random, non-specific location (gene augmentation). In yet further embodiments, the polynucleotide may be stably maintained in the cell as a separate, episomal segment of DNA. Such polynucleotide segments or “episomes” encode sequences sufficient to permit maintenance and replication independent of or in synchronization with the host cell cycle. The manner in which the expression construct is delivered to a cell and where in the cell the polynucleotide remains is dependent on the type of expression construct employed.

[1245] In another embodiment of the invention, a polynucleotide is administered/delivered as “naked” DNA, for example as described in Ulmer et al., Science 259:1745-1749, 1993 and reviewed by Cohen, Science 259:1691-1692, 1993. The uptake of naked DNA may be increased by coating the DNA onto biodegradable beads, which are efficiently transported into the cells.

[1246] In still another embodiment, a composition of the present invention can be delivered via a particle bombardment approach, many of which have been described. In one illustrative example, gas-driven particle acceleration can be achieved with devices such as those manufactured by Powderject Pharmaceuticals PLC (Oxford, UK) and Powderject Vaccines Inc. (Madison, Wis.), some examples of which are described in U.S. Pat. Nos. 5,846,796; 6,010,478; 5,865,796; 5,584,807; and EP Patent No. 0500 799. This approach offers a needle-free delivery approach wherein a dry powder formulation of microscopic particles, such as polynucleotide or polypeptide particles, are accelerated to high speed within a helium gas jet generated by a hand held device, propelling the particles into a target tissue of interest.

[1247] In a related embodiment, other devices and methods that may be useful for gas-driven needle-less injection of compositions of the present invention include those provided by Bioject, Inc. (Portland, Oreg.), some examples of which are described in U.S. Pat. Nos. 4,790,824; 5,064,413; 5,312,335; 5,383,851; 5,399,163; 5,520,639 and 5,993,412.

[1248] According to another embodiment, the pharmaceutical compositions described herein will comprise one or more immunostimulants in addition to the immunogenic polynucleotide, polypeptide, antibody, T-cell and/or APC compositions of this invention. An immunostimulant refers to essentially any substance that enhances or potentiates an immune response (antibody and/or cell-mediated) to an exogenous antigen. One preferred type of immunostimulant comprises an adjuvant. Many adjuvants contain a substance designed to protect the antigen from rapid catabolism, such as aluminum hydroxide or mineral oil, and a stimulator of immune responses, such as lipid A, Bortadella pertussis or Mycobacterium tuberculosis derived proteins. Certain adjuvants are commercially available as, for example, Freund's Incomplete Adjuvant and Complete Adjuvant (Difco Laboratories, Detroit, Mich.); Merck Adjuvant 65 (Merck and Company, Inc., Rahway, N.J.); AS-2 (SmithKline Beecham, Philadelphia, Pa.); aluminum salts such as aluminum hydroxide gel (alum) or aluminum phosphate; salts of calcium, iron or zinc; an insoluble suspension of acylated tyrosine; acylated sugars; cationically or anionically derivatized polysaccharides; polyphosphazenes; biodegradable microspheres; monophosphoryl lipid A and quil A. Cytokines, such as GM-CSF, interleukin-2, -7, -12, and other like growth factors, may also be used as adjuvants.

[1249] Within certain embodiments of the invention, the adjuvant composition is preferably one that induces an immune response predominantly of the Th1 type. High levels of Th1-type cytokines (e.g., IFN-γ, TNFα, IL-2 and IL-12) tend to favor the induction of cell mediated immune responses to an administered antigen. In contrast, high levels of Th2-type cytokines (e.g., IL-4, IL-5, IL-6 and IL-10) tend to favor the induction of humoral immune responses. Following application of a vaccine as provided herein, a patient will support an immune response that includes Th1- and Th2-type responses. Within a preferred embodiment, in which a response is predominantly Th1-type, the level of Th1-type cytokines will increase to a greater extent than the level of Th2-type cytokines. The levels of these cytokines may be readily assessed using standard assays. For a review of the families of cytokines, see Mosmann and Coffman, Ann. Rev. Immunol. 7:145-173, 1989.

[1250] Certain preferred adjuvants for eliciting a predominantly Th1-type response include, for example, a combination of monophosphoryl lipid A, preferably 3-de-O-acylated monophosphoryl lipid A, together with an aluminum salt. MPL® adjuvants are available from Corixa Corporation (Seattle, Wash.; see, for example, U.S. Pat. Nos. 4,436,727; 4,877,611; 4,866,034 and 4,912,094). CpG-containing oligonucleotides (in which the CpG dinucleotide is unmethylated) also induce a predominantly Th1 response. Such oligonucleotides are well known and are described, for example, in WO 96/02555, WO 99/33488 and U.S. Pat. Nos. 6,008,200 and 5,856,462. Immunostimulatory DNA sequences are also described, for example, by Sato et al., Science 273:352, 1996. Another preferred adjuvant comprises a saponin, such as Quil A, or derivatives thereof, including QS21 and QS7 (Aquila Biopharmaceuticals Inc., Framingham, MA); Escin; Digitonin; or Gypsophila or Chenopodium quinoa saponins. Other preferred formulations include more than one saponin in the adjuvant combinations of the present invention, for example combinations of at least two of the following group comprising QS21, QS7, Quil A, β-escin, or digitonin.

[1251] Alternatively the saponin formulations may be combined with vaccine vehicles composed of chitosan or other polycationic polymers, polylactide and polylactide-co-glycolide particles, poly-N-acetyl glucosamine-based polymer matrix, particles composed of polysaccharides or chemically modified polysaccharides, liposomes and lipid-based particles, particles composed of glycerol monoesters, etc. The saponins may also be formulated in the presence of cholesterol to form particulate structures such as liposomes or ISCOMs. Furthermore, the saponins may be formulated together with a polyoxyethylene ether or ester, in either a non-particulate solution or suspension, or in a particulate structure such as a paucilamelar liposome or ISCOM. The saponins may also be formulated with excipients such as Carbopol^{R} to increase viscosity, or may be formulated in a dry powder form with a powder excipient such as lactose.

[1252] In one preferred embodiment, the adjuvant system includes the combination of a monophosphoryl lipid A and a saponin derivative, such as the combination of QS21 and 3D-MPL® adjuvant, as described in WO 94/00153, or a less reactogenic composition where the QS21 is quenched with cholesterol, as described in WO 96/33739. Other preferred formulations comprise an oil-in-water emulsion and tocopherol. Another particularly preferred adjuvant formulation employing QS21, 3D-MPL® adjuvant and tocopherol in an oil-in-water emulsion is described in WO 95/17210.

[1253] Another enhanced adjuvant system involves the combination of a CpG-containing oligonucleotide and a saponin derivative particularly the combination of CpG and QS21 is disclosed in WO 00/09159. Preferably the formulation additionally comprises an oil in water emulsion and tocopherol.

[1254] Additional illustrative adjuvants for use in the pharmaceutical compositions of the invention include Montamide ISA 720 (Seppic, France), SAF (Chiron, California, United States), ISCOMS (CSL), MF-59 (Chiron), the SBAS series of adjuvants (e.g., SBAS-2 or SBAS-4, available from SmithKline Beecham, Rixensart, Belgium), Detox (Enhanzyn®) (Corixa, Hamilton, Mont.), RC-529 (Corixa, Hamilton, Mont.) and other aminoalkyl glucosaminide 4-phosphates (AGPs), such as those described in pending U.S. patent application Ser. Nos. 08/853,826 and 09/074,720, the disclosures of which are incorporated herein by reference in their entireties, and polyoxyethylene ether adjuvants such as those described in WO 99/52549A1.

[1255] Other preferred adjuvants include adjuvant molecules of the general formula

(I): HO(CH₂CH₂O)ₙ-A-R,

[1256] wherein, n is 1-50, A is a bond or —C(O)—, R is C₁₋₅₀ alkyl or Phenyl C₁₋₅₀ alkyl.

[1257] One embodiment of the present invention consists of a vaccine formulation comprising a polyoxyethylene ether of general formula (I), wherein n is between 1 and 50, preferably 4-24, most preferably 9; the R component is C₁₋₅₀, preferably C₄-C₂₀ alkyl and most preferably C₁₂ alkyl, and A is a bond. The concentration of the polyoxyethylene ethers should be in the range 0.1-20%, preferably from 0.1-10%, and most preferably in the range 0.1-1%. Preferred polyoxyethylene ethers are selected from the following group: polyoxyethylene-9-lauryl ether, polyoxyethylene-9-steoryl ether, polyoxyethylene-8-steoryl ether, polyoxyethylene-4-lauryl ether, polyoxyethylene-35-lauryl ether, and polyoxyethylene-23-lauryl ether. Polyoxyethylene ethers such as polyoxyethylene lauryl ether are described in the Merck index (12^{th} edition: entry 7717). These adjuvant molecules are described in WO 99/52549.

[1258] The polyoxyethylene ether according to the general formula (I) above may, if desired, be combined with another adjuvant. For example, a preferred adjuvant combination is preferably with CpG as described in the pending UK patent application GB 9820956.2.

[1259] According to another embodiment of this invention, an immunogenic composition described herein is delivered to a host via antigen presenting cells (APCs), such as dendritic cells, macrophages, B cells, monocytes and other cells that may be engineered to be efficient APCs. Such cells may, but need not, be genetically modified to increase the capacity for presenting the antigen, to improve activation and/or maintenance of the T cell response, to have anti-tumor effects per se and/or to be immunologically compatible with the receiver (i.e., matched HLA haplotype). APCs may generally be isolated from any of a variety of biological fluids and organs, including tumor and peritumoral tissues, and may be autologous, allogeneic, syngeneic or xenogeneic cells.

[1260] Certain preferred embodiments of the present invention use dendritic cells or progenitors thereof as antigen-presenting cells. Dendritic cells are highly potent APCs (Banchereau and Steinman, Nature 392:245-251, 1998) and have been shown to be effective as a physiological adjuvant for eliciting prophylactic or therapeutic antitumor immunity (see Timmerman and Levy, Ann. Rev. Med 50:507-529, 1999). In general, dendritic cells may be identified based on their typical shape (stellate in situ, with marked cytoplasmic processes (dendrites) visible in vitro), their ability to take up, process and present antigens with high efficiency and their ability to activate naïve T cell responses. Dendritic cells may, of course, be engineered to express specific cell-surface receptors or ligands that are not commonly found on dendritic cells in vivo or ex vivo, and such modified dendritic cells are contemplated by the present invention. As an alternative to dendritic cells, secreted vesicles antigen-loaded dendritic cells (called exosomes) may be used within a vaccine (see Zitvogel et al., Nature Med. 4:594-600, 1998).

[1261] Dendritic cells and progenitors may be obtained from peripheral blood, bone marrow, tumor-infiltrating cells, peritumoral tissues-infiltrating cells, lymph nodes, spleen, skin, umbilical cord blood or any other suitable tissue or fluid. For example, dendritic cells may be differentiated ex vivo by adding a combination of cytokines such as GM-CSF, IL-4, IL-13 and/or TNFα to cultures of monocytes harvested from peripheral blood. Alternatively, CD34 positive cells harvested from peripheral blood, umbilical cord blood or bone marrow may be differentiated into dendritic cells by adding to the culture medium combinations of GM-CSF, IL-3, TNFα, CD40 ligand, LPS, flt3 ligand and/or other compound(s) that induce differentiation, maturation and proliferation of dendritic cells.

[1262] Dendritic cells are conveniently categorized as “immature” and “mature” cells, which allows a simple way to discriminate between two well characterized phenotypes. However, this nomenclature should not be construed to exclude all possible intermediate stages of differentiation. Immature dendritic cells are characterized as APC with a high capacity for antigen uptake and processing, which correlates with the high expression of Fcγ receptor and mannose receptor. The mature phenotype is typically characterized by a lower expression of these markers, but a high expression of cell surface molecules responsible for T cell activation such as class I and class II MHC, adhesion molecules (e.g., CD54 and CD11) and costimulatory molecules (e.g., CD40, CD80, CD86 and 4-1BB).

[1263] APCs may generally be transfected with a polynucleotide of the invention (or portion or other variant thereof) such that the encoded polypeptide, or an immunogenic portion thereof, is expressed on the cell surface. Such transfection may take place ex vivo, and a pharmaceutical composition comprising such transfected cells may then be used for therapeutic purposes, as described herein. Alternatively, a gene delivery vehicle that targets a dendritic or other antigen presenting cell may be administered to a patient, resulting in transfection that occurs in vivo. In vivo and ex vivo transfection of dendritic cells, for example, may generally be performed using any methods known in the art, such as those described in WO 97/24447, or the gene gun approach described by Mahvi et al., Immunology and cell Biology 75:456-460, 1997. Antigen loading of dendritic cells may be achieved by incubating dendritic cells or progenitor cells with the tumor polypeptide, DNA (naked or within a plasmid vector) or RNA; or with antigen-expressing recombinant bacterium or viruses (e.g., vaccinia, fowlpox, adenovirus or lentivirus vectors). Prior to loading, the polypeptide may be covalently conjugated to an immunological partner that provides T cell help (e.g., a carrier molecule). Alternatively, a dendritic cell may be pulsed with a non-conjugated immunological partner, separately or in the presence of the polypeptide.

[1264] While any suitable carrier known to those of ordinary skill in the art may be employed in the pharmaceutical compositions of this invention, the type of carrier will typically vary depending on the mode of administration. Compositions of the present invention may be formulated for any appropriate manner of administration, including for example, topical, oral, nasal, mucosal, intravenous, intracranial, intraperitoneal, subcutaneous and intramuscular administration.

[1265] Carriers for use within such pharmaceutical compositions are biocompatible, and may also be biodegradable. In certain embodiments, the formulation preferably provides a relatively constant level of active component release. In other embodiments, however, a more rapid rate of release immediately upon administration may be desired. The formulation of such compositions is well within the level of ordinary skill in the art using known techniques. Illustrative carriers useful in this regard include microparticles of poly(lactide-co-glycolide), polyacrylate, latex, starch, cellulose, dextran and the like. Other illustrative delayed-release carriers include supramolecular biovectors, which comprise a non-liquid hydrophilic core (e.g., a cross-linked polysaccharide or oligosaccharide) and, optionally, an external layer comprising an amphiphilic compound, such as a phospholipid (see e.g., U.S. Pat. No. 5,151,254 and PCT applications WO 94/20078, WO/94/23701 and WO 96/06638). The amount of active compound contained within a sustained release formulation depends upon the site of implantation, the rate and expected duration of release and the nature of the condition to be treated or prevented.

[1266] In another illustrative embodiment, biodegradable microspheres (e.g., polylactate polyglycolate) are employed as carriers for the compositions of this invention. Suitable biodegradable microspheres are disclosed, for example, in U.S. Pat. Nos. 4,897,268; 5,075,109; 5,928,647; 5,811,128; 5,820,883; 5,853,763; 5,814,344, 5,407,609 and 5,942,252. Modified hepatitis B core protein carrier systems, such as described in WO/99 40934, and references cited therein, will also be useful for many applications. Another illustrative carrier/delivery system employs a carrier comprising particulate-protein complexes, such as those described in U.S. Pat. No. 5,928,647, which are capable of inducing a class I-restricted cytotoxic T lymphocyte responses in a host.

[1267] The pharmaceutical compositions of the invention will often further comprise one or more buffers (e.g., neutral buffered saline or phosphate buffered saline), carbohydrates (e.g., glucose, mannose, sucrose or dextrans), mannitol, proteins, polypeptides or amino acids such as glycine, antioxidants, bacteriostats, chelating agents such as EDTA or glutathione, adjuvants (e.g., aluminum hydroxide), solutes that render the formulation isotonic, hypotonic or weakly hypertonic with the blood of a recipient, suspending agents, thickening agents and/or preservatives. Alternatively, compositions of the present invention may be formulated as a lyophilizate.

[1268] The pharmaceutical compositions described herein may be presented in unit-dose or multi-dose containers, such as sealed ampoules or vials. Such containers are typically sealed in such a way to preserve the sterility and stability of the formulation until use. In general, formulations may be stored as suspensions, solutions or emulsions in oily or aqueous vehicles. Alternatively, a pharmaceutical composition may be stored in a freeze-dried condition requiring only the addition of a sterile liquid carrier immediately prior to use.

[1269] The development of suitable dosing and treatment regimens for using the particular compositions described herein in a variety of treatment regimens, including e.g., oral, parenteral, intravenous, intranasal, and intramuscular administration and formulation, is well known in the art, some of which are briefly discussed below for general purposes of illustration.

[1270] In certain applications, the pharmaceutical compositions disclosed herein may be delivered via oral administration to an animal. As such, these compositions may be formulated with an inert diluent or with an assimilable edible carrier, or they may be enclosed in hard- or soft-shell gelatin capsule, or they may be compressed into tablets, or they may be incorporated directly with the food of the diet.

[1271] The active compounds may even be incorporated with excipients and used in the form of ingestible tablets, buccal tables, troches, capsules, elixirs, suspensions, syrups, wafers, and the like (see, for example, Mathiowitz et al., Nature Mar. 27, 1997;386(6623):410-4; Hwang et al., Crit Rev Ther Drug Carrier Syst 1998;15(3):243-84; U.S. Pat. No. 5,641,515; U.S. Pat. No. 5,580,579 and U.S. Pat. No. 5,792,451). Tablets, troches, pills, capsules and the like may also contain any of a variety of additional components, for example, a binder, such as gum tragacanth, acacia, cornstarch, or gelatin; excipients, such as dicalcium phosphate; a disintegrating agent, such as corn starch, potato starch, alginic acid and the like; a lubricant, such as magnesium stearate; and a sweetening agent, such as sucrose, lactose or saccharin may be added or a flavoring agent, such as peppermint, oil of wintergreen, or cherry flavoring. When the dosage unit form is a capsule, it may contain, in addition to materials of the above type, a liquid carrier. Various other materials may be present as coatings or to otherwise modify the physical form of the dosage unit. For instance, tablets, pills, or capsules may be coated with shellac, sugar, or both. Of course, any material used in preparing any dosage unit form should be pharmaceutically pure and substantially non-toxic in the amounts employed. In addition, the active compounds may be incorporated into sustained-release preparation and formulations.

[1272] Typically, these formulations will contain at least about 0.1% of the active compound or more, although the percentage of the active ingredient(s) may, of course, be varied and may conveniently be between about 1 or 2% and about 60% or 70% or more of the weight or volume of the total formulation. Naturally, the amount of active compound(s) in each therapeutically useful composition may be prepared is such a way that a suitable dosage will be obtained in any given unit dose of the compound. Factors such as solubility, bioavailability, biological half-life, route of administration, product shelf life, as well as other pharmacological considerations will be contemplated by one skilled in the art of preparing such pharmaceutical formulations, and as such, a variety of dosages and treatment regimens may be desirable.

[1273] For oral administration the compositions of the present invention may alternatively be incorporated with one or more excipients in the form of a mouthwash, dentifrice, buccal tablet, oral spray, or sublingual orally-administered formulation. Alternatively, the active ingredient may be incorporated into an oral solution such as one containing sodium borate, glycerin and potassium bicarbonate, or dispersed in a dentifrice, or added in a therapeutically-effective amount to a composition that may include water, binders, abrasives, flavoring agents, foaming agents, and humectants. Alternatively the compositions may be fashioned into a tablet or solution form that may be placed under the tongue or otherwise dissolved in the mouth.

[1274] In certain circumstances it will be desirable to deliver the pharmaceutical compositions disclosed herein parenterally, intravenously, intramuscularly, or even intraperitoneally. Such approaches are well known to the skilled artisan, some of which are further described, for example, in U.S. Pat. No. 5,543,158; U.S. Pat. No. 5,641,515 and U.S. Pat. No. 5,399,363. In certain embodiments, solutions of the active compounds as free base or pharmacologically acceptable salts may be prepared in water suitably mixed with a surfactant, such as hydroxypropylcellulose. Dispersions may also be prepared in glycerol, liquid polyethylene glycols, and mixtures thereof and in oils. Under ordinary conditions of storage and use, these preparations generally will contain a preservative to prevent the growth of microorganisms.

[1275] Illustrative pharmaceutical forms suitable for injectable use include sterile aqueous solutions or dispersions and sterile powders for the extemporaneous preparation of sterile injectable solutions or dispersions (for example, see U.S. Pat. No. 5,466,468). In all cases the form must be sterile and must be fluid to the extent that easy syringability exists. It must be stable under the conditions of manufacture and storage and must be preserved against the contaminating action of microorganisms, such as bacteria and fungi. The carrier can be a solvent or dispersion medium containing, for example, water, ethanol, polyol (e.g., glycerol, propylene glycol, and liquid polyethylene glycol, and the like), suitable mixtures thereof, and/or vegetable oils. Proper fluidity may be maintained, for example, by the use of a coating, such as lecithin, by the maintenance of the required particle size in the case of dispersion and/or by the use of surfactants. The prevention of the action of microorganisms can be facilitated by various antibacterial and antifungal agents, for example, parabens, chlorobutanol, phenol, sorbic acid, thimerosal, and the like. In many cases, it will be preferable to include isotonic agents, for example, sugars or sodium chloride. Prolonged absorption of the injectable compositions can be brought about by the use in the compositions of agents delaying absorption, for example, aluminum monostearate and gelatin.

[1276] In one embodiment, for parenteral administration in an aqueous solution, the solution should be suitably buffered if necessary and the liquid diluent first rendered isotonic with sufficient saline or glucose. These particular aqueous solutions are especially suitable for intravenous, intramuscular, subcutaneous and intraperitoneal administration. In this connection, a sterile aqueous medium that can be employed will be known to those of skill in the art in light of the present disclosure. For example, one dosage may be dissolved in 1 ml of isotonic NaCl solution and either added to 1000 ml of hypodernoclysis fluid or injected at the proposed site of infusion, (see for example, “Remington's Pharmaceutical Sciences” 15th Edition, pages 1035-1038 and 1570-1580). Some variation in dosage will necessarily occur depending on the condition of the subject being treated. Moreover, for human administration, preparations will of course preferably meet sterility, pyrogenicity, and the general safety and purity standards as required by FDA Office of Biologics standards.

[1277] In another embodiment of the invention, the compositions disclosed herein may be formulated in a neutral or salt form. Illustrative pharmaceutically-acceptable salts include the acid addition salts (formed with the free amino groups of the protein) and which are formed with inorganic acids such as, for example, hydrochloric or phosphoric acids, or such organic acids as acetic, oxalic, tartaric, mandelic, and the like. Salts formed with the free carboxyl groups can also be derived from inorganic bases such as, for example, sodium, potassium, ammonium, calcium, or ferric hydroxides, and such organic bases as isopropylamine, trimethylamine, histidine, procaine and the like. Upon formulation, solutions will be administered in a manner compatible with the dosage formulation and in such amount as is therapeutically effective.

[1278] The carriers can further comprise any and all solvents, dispersion media, vehicles, coatings, diluents, antibacterial and antifungal agents, isotonic and absorption delaying agents, buffers, carrier solutions, suspensions, colloids, and the like. The use of such media and agents for pharmaceutical active substances is well known in the art. Except insofar as any conventional media or agent is incompatible with the active ingredient, its use in the therapeutic compositions is contemplated. Supplementary active ingredients can also be incorporated into the compositions. The phrase “pharmaceutically-acceptable” refers to molecular entities and compositions that do not produce an allergic or similar untoward reaction when administered to a human.

[1279] In certain embodiments, the pharmaceutical compositions may be delivered by intranasal sprays, inhalation, and/or other aerosol delivery vehicles. Methods for delivering genes, nucleic acids, and peptide compositions directly to the lungs via nasal aerosol sprays has been described, e.g., in U.S. Pat. No. 5,756,353 and U.S. Pat. No. 5,804,212. Likewise, the delivery of drugs using intranasal microparticle resins (Takenaga et al., J Controlled Release Mar. 2, 1998;52(1-2):81-7) and lysophosphatidyl-glycerol compounds (U.S. Pat. No. 5,725,871) are also well-known in the pharmaceutical arts.

[1280] Likewise, illustrative transmucosal drug delivery in the form of a polytetrafluoroetheylene support matrix is described in U.S. Pat. No. 5,780,045.

[1281] In certain embodiments, liposomes, nanocapsules, microparticles, lipid particles, vesicles, and the like, are used for the introduction of the compositions of the present invention into suitable host cells/organisms. In particular, the compositions of the present invention may be formulated for delivery either encapsulated in a lipid particle, a liposome, a vesicle, a nanosphere, or a nanoparticle or the like. Alternatively, compositions of the present invention can be bound, either covalently or non-covalently, to the surface of such carrier vehicles.

[1282] The formation and use of liposome and liposome-like preparations as potential drug carriers is generally known to those of skill in the art (see for example, Lasic, Trends Biotechnol 1998 July; 16(7):307-21; Takakura, Nippon Rinsho 1998 March;56(3):691-5; Chandran et al., Indian J Exp Biol. 1997 August;35(8):801-9; Margalit, Crit Rev Ther Drug Carrier Syst. 1995;12(2-3):233-61; U.S. Pat. No. 5,567,434; U.S. Pat. No. 5,552,157; U.S. Pat. No. 5,565,213; U.S. Pat. No. 5,738,868 and U.S. Pat. No. 5,795,587, each specifically incorporated herein by reference in its entirety).

[1283] Liposomes have been used successfully with a number of cell types that are normally difficult to transfect by other procedures, including T cell suspensions, primary hepatocyte cultures and PC 12 cells (Renneisen et al., J. Biol. Chem. Sep. 25, 1990;265(27):16337-42; Muller et al., DNA Cell Biol. 1990 April;9(3):221-9). In addition, liposomes are free of the DNA length constraints that are typical of viral-based delivery systems. Liposomes have been used effectively to introduce genes, various drugs, radiotherapeutic agents, enzymes, viruses, transcription factors, allosteric effectors and the like, into a variety of cultured cell lines and animals. Furthermore, he use of liposomes does not appear to be associated with autoimmune responses or unacceptable toxicity after systemic delivery.

[1284] In certain embodiments, liposomes are formed from phospholipids that are dispersed in an aqueous medium and spontaneously form multilamellar concentric bilayer vesicles (also termed multilamellar vesicles (MLVs).

[1285] Alternatively, in other embodiments, the invention provides for pharmaceutically-acceptable nanocapsule formulations of the compositions of the present invention. Nanocapsules can generally entrap compounds in a stable and reproducible way (see, for example, Quintanar-Guerrero et al., Drug Dev Ind Pharm. 1998 December;24(12):1113-28). To avoid side effects due to intracellular polymeric overloading, such ultrafine particles (sized around 0.1 μm) may be designed using polymers able to be degraded in vivo. Such particles can be made as described, for example, by Couvreur et al., Crit Rev Ther Drug Carrier Syst. 1988;5(1):1-20; zur Muhlen et al., Eur J Pharn Biopharm. 1998 March;45(2):149-55; Zambaux et al. J Controlled Release. Jan. 2, 1998;50(1-3):31-40; and U.S. Pat. No. 5,145,684.

[1286] Cancer Therapeutic Methods

[1287] Immunologic approaches to cancer therapy are based on the recognition that cancer cells can often evade the body's defenses against aberrant or foreign cells and molecules, and that these defenses might be therapeutically stimulated to regain the lost ground, e.g. pgs. 623-648 in Klein, Immunology (Wiley-Interscience, New York, 1982). Numerous recent observations that various immune effectors can directly or indirectly inhibit growth of tumors has led to renewed interest in this approach to cancer therapy, e.g. Jager, et al., Oncology 2001;60(1):1-7; Renner, et al., Ann Hematol 2000 December; 79(12):651-9.

[1288] Four-basic cell types whose function has been associated with antitumor cell immunity and the elimination of tumor cells from the body are: i) B-lymphocytes which secrete immunoglobulins into the blood plasma for identifying and labeling the nonself invader cells; ii) monocytes which secrete the complement proteins that are responsible for lysing and processing the immunoglobulin-coated target invader cells; iii) natural killer lymphocytes having two mechanisms for the destruction of tumor cells, antibody-dependent cellular cytotoxicity and natural killing; and iv) T-lymphocytes possessing antigen-specific receptors and having the capacity to recognize a tumor cell carrying complementary marker molecules (Schreiber, H., 1989, in Fundamental Immunology (ed). W. E. Paul, pp. 923-955).

[1289] Cancer immunotherapy generally focuses on inducing humoral immune responses, cellular immune responses, or both. Moreover, it is well established that induction of CD4⁺ T helper cells is necessary in order to secondarily induce either antibodies or cytotoxic CD8⁺ T cells. Polypeptide antigens that are selective or ideally specific for cancer cells, particularly lung cancer cells, offer a powerful approach for inducing immune responses against lung cancer, and are an important aspect of the present invention.

[1290] Therefore, in further aspects of the present invention, the pharmaceutical compositions described herein may be used for the treatment of cancer, particularly for the immunotherapy of lung cancer. Within such methods, the pharmaceutical compositions described herein are administered to a patient, typically a warm-blooded animal, preferably a human. A patient may or may not be afflicted with cancer. Accordingly, the above pharmaceutical compositions may be used to prevent the development of a cancer or to treat a patient afflicted with a cancer. Pharmaceutical compositions and vaccines may be administered either prior to or following surgical removal of primary tumors and/or treatment such as administration of radiotherapy or conventional chemotherapeutic drugs. As discussed above, administration of the pharmaceutical compositions may be by any suitable method, including administration by intravenous, intraperitoneal, intramuscular, subcutaneous, intranasal, intradermal, anal, vaginal, topical and oral routes.

[1291] Within certain embodiments, immunotherapy may be active immunotherapy, in which treatment relies on the in vivo stimulation of the endogenous host immune system to react against tumors with the administration of immune response-modifying agents (such as polypeptides and polynucleotides as provided herein).

[1292] Within other embodiments, immunotherapy may be passive immunotherapy, in which treatment involves the delivery of agents with established tumor-immune reactivity (such as effector cells or antibodies) that can directly or indirectly mediate antitumor effects and does not necessarily depend on an intact host immune system. Examples of effector cells include T cells as discussed above, T lymphocytes (such as CD8⁺ cytotoxic T lymphocytes and CD4⁺ T-helper tumor-infiltrating lymphocytes), killer cells (such as Natural Killer cells and lymphokine-activated killer cells), B cells and antigen-presenting cells (such as dendritic cells and macrophages) expressing a polypeptide provided herein. T cell receptors and antibody receptors specific for the polypeptides recited herein may be cloned, expressed and transferred into other vectors or effector cells for adoptive immunotherapy. The polypeptides provided herein may also be used to generate antibodies or anti-idiotypic antibodies (as described above and in U.S. Pat. No. 4,918,164) for passive immunotherapy.

[1293] Monoclonal antibodies may be labeled with any of a variety of labels for desired selective usages in detection, diagnostic assays or therapeutic applications (as described in U.S. Pat. Nos. 6,090,365; 6,015,542; 5,843,398; 5,595,721; and 4,708,930, hereby incorporated by reference in their entirety as if each was incorporated individually). In each case, the binding of the labelled monoclonal antibody to the determinant site of the antigen will signal detection or delivery of a particular therapeutic agent to the antigenic determinant on the non-normal cell. A further object of this invention is to provide the specific monoclonal antibody suitably labelled for achieving such desired selective usages thereof.

[1294] Effector cells may generally be obtained in sufficient quantities for adoptive immunotherapy by growth in vitro, as described herein. Culture conditions for expanding single antigen-specific effector cells to several billion in number with retention of antigen recognition in vivo are well known in the art. Such in vitro culture conditions typically use intermittent stimulation with antigen, often in the presence of cytokines (such as IL-2) and non-dividing feeder cells. As noted above, immunoreactive polypeptides as provided herein may be used to rapidly expand antigen-specific T cell cultures in order to generate a sufficient number of cells for immunotherapy. In particular, antigen-presenting cells, such as dendritic, macrophage, monocyte, fibroblast and/or B cells, may be pulsed with immunoreactive polypeptides or transfected with one or more polynucleotides using standard techniques well known in the art. For example, antigen-presenting cells can be transfected with a polynucleotide having a promoter appropriate for increasing expression in a recombinant virus or other expression system. Cultured effector cells for use in therapy must be able to grow and distribute widely, and to survive long term in vivo. Studies have shown that cultured effector cells can be induced to grow in vivo and to survive long term in substantial numbers by repeated stimulation with antigen supplemented with IL-2 (see, for example, Cheever et al., Immunological Reviews 157:177, 1997).

[1295] Alternatively, a vector expressing a polypeptide recited herein may be introduced into antigen presenting cells taken from a patient and clonally propagated ex vivo for transplant back into the same patient. Transfected cells may be reintroduced into the patient using any means known in the art, preferably in sterile form by intravenous, intracavitary, intraperitoneal or intratumor administration.

[1296] Routes and frequency of administration of the therapeutic compositions described herein, as well as dosage, will vary from individual to individual, and may be readily established using standard techniques. In general, the pharmaceutical compositions and vaccines may be administered by injection (e.g., intracutaneous, intramuscular, intravenous or subcutaneous), intranasally (e.g., by aspiration) or orally. Preferably, between 1 and 10 doses may be administered over a 52 week period. Preferably, 6 doses are administered, at intervals of 1 month, and booster vaccinations may be given periodically thereafter. Alternate protocols may be appropriate for individual patients. A suitable dose is an amount of a compound that, when administered as described above, is capable of promoting an anti-tumor immune response, and is at least 10-50% above the basal (i.e., untreated) level. Such response can be monitored by measuring the anti-tumor antibodies in a patient or by vaccine-dependent generation of cytolytic effector cells capable of killing the patient's tumor cells in vitro. Such vaccines should also be capable of causing an immune response that leads to an improved clinical outcome (e.g., more frequent remissions, complete or partial or longer disease-free survival) in vaccinated patients as compared to non-vaccinated patients. In general, for pharmaceutical compositions and vaccines comprising one or more polypeptides, the amount of each polypeptide present in a dose ranges from about 25 μg to 5 mg per kg of host. Suitable dose sizes will vary with the size of the patient, but will typically range from about 0.1 mL to about 5 mL.

[1297] In general, an appropriate dosage and treatment regimen provides the active compound(s) in an amount sufficient to provide therapeutic and/or prophylactic benefit. Such a response can be monitored by establishing an improved clinical outcome (e.g., more frequent remissions, complete or partial, or longer disease-free survival) in treated patients as compared to non-treated patients. Increases in preexisting immune responses to a tumor protein generally correlate with an improved clinical outcome. Such immune responses may generally be evaluated using standard proliferation, cytotoxicity or cytokine assays, which may be performed using samples obtained from a patient before and after treatment.

[1298] Cancer Detection and Diagnostic Compositions Methods and Kits

[1299] In general, a cancer may be detected in a patient based on the presence of one or more lung tumor proteins and/or polynucleotides encoding such proteins in a biological sample (for example, blood, sera, sputum urine and/or tumor biopsies) obtained from the patient. In other words, such proteins may be used as markers to indicate the presence or absence of a cancer such as lung cancer. In addition, such proteins may be useful for the detection of other cancers. The binding agents provided herein generally permit detection of the level of antigen that binds to the agent in the biological sample.

[1300] Polynucleotide primers and probes may be used to detect the level of mRNA encoding a tumor protein, which is also indicative of the presence or absence of a cancer. In general, a tumor sequence should be present at a level that is at least two-fold, preferably three-fold, and more preferably five-fold or higher in tumor tissue than in normal tissue of the same type from which the tumor arose. Expression levels of a particular tumor sequence in tissue types different from that in which the tumor arose are irrelevant in certain diagnostic embodiments since the presence of tumor cells can be confirmed by observation of predetermined differential expression levels, e.g., 2-fold, 5-fold, etc, in tumor tissue to expression levels in normal tissue of the same type.

[1301] Other differential expression patterns can be utilized advantageously for diagnostic purposes. For example, in one aspect of the invention, overexpression of a tumor sequence in tumor tissue and normal tissue of the same type, but not in other normal tissue types, e.g. PBMCs, can be exploited diagnostically. In this case, the presence of metastatic tumor cells, for example in a sample taken from the circulation or some other tissue site different from that in which the tumor arose, can be identified and/or confirmed by detecting expression of the tumor sequence in the sample, for example using RT-PCR analysis. In many instances, it will be desired to enrich for tumor cells in the sample of interest, e.g., PBMCs, using cell capture or other like techniques.

[1302] There are a variety of assay formats known to those of ordinary skill in the art for using a binding agent to detect polypeptide markers in a sample. See, e.g., Harlow and Lane, Antibodies: A Laboratory Manual, Cold Spring Harbor Laboratory, 1988. In general, the presence or absence of a cancer in a patient may be determined by (a) contacting a biological sample obtained from a patient with a binding agent; (b) detecting in the sample a level of polypeptide that binds to the binding agent; and (c) comparing the level of polypeptide with a predetermined cut-off value.

[1303] In a preferred embodiment, the assay involves the use of binding agent immobilized on a solid support to bind to and remove the polypeptide from the remainder of the sample. The bound polypeptide may then be detected using a detection reagent that contains a reporter group and specifically binds to the binding agent/polypeptide complex. Such detection reagents may comprise, for example, a binding agent that specifically binds to the polypeptide or an antibody or other agent that specifically binds to the binding agent, such as an anti-immunoglobulin, protein G, protein A or a lectin. Alternatively, a competitive assay may be utilized, in which a polypeptide is labeled with a reporter group and allowed to bind to the immobilized binding agent after incubation of the binding agent with the sample. The extent to which components of the sample inhibit the binding of the labeled polypeptide to the binding agent is indicative of the reactivity of the sample with the immobilized binding agent. Suitable polypeptides for use within such assays include full length lung tumor proteins and polypeptide portions thereof to which the binding agent binds, as described above.

[1304] The solid support may be any material known to those of ordinary skill in the art to which the tumor protein may be attached. For example, the solid support may be a test well in a microtiter plate or a nitrocellulose or other suitable membrane. Alternatively, the support may be a bead or disc, such as glass, fiberglass, latex or a plastic material such as polystyrene or polyvinylchloride. The support may also be a magnetic particle or a fiber optic sensor, such as those disclosed, for example, in U.S. Pat. No. 5,359,681. The binding agent may be immobilized on the solid support using a variety of techniques known to those of skill in the art, which are amply described in the patent and scientific literature. In the context of the present invention, the term “immobilization” refers to both noncovalent association, such as adsorption, and covalent attachment (which may be a direct linkage between the agent and functional groups on the support or may be a linkage by way of a cross-linking agent). Immobilization by adsorption to a well in a microtiter plate or to a membrane is preferred. In such cases, adsorption may be achieved by contacting the binding agent, in a suitable buffer, with the solid support for a suitable amount of time. The contact time varies with temperature, but is typically between about 1 hour and about 1 day. In general, contacting a well of a plastic microtiter plate (such as polystyrene or polyvinylchloride) with an amount of binding agent ranging from about 10 ng to about 10 μg, and preferably about 100 ng to about 1 μg, is sufficient to immobilize an adequate amount of binding agent.

[1305] Covalent attachment of binding agent to a solid support may generally be achieved by first reacting the support with a bifunctional reagent that will react with both the support and a functional group, such as a hydroxyl or amino group, on the binding agent. For example, the binding agent may be covalently attached to supports having an appropriate polymer coating using benzoquinone or by condensation of an aldehyde group on the support with an amine and an active hydrogen on the binding partner (see, e.g., Pierce Immunotechnology Catalog and Handbook, 1991, at A12-A13).

[1306] In certain embodiments, the assay is a two-antibody sandwich assay. This assay may be performed by first contacting an antibody that has been immobilized on a solid support, commonly the well of a microtiter plate, with the sample, such that polypeptides within the sample are allowed to bind to the immobilized antibody. Unbound sample is then removed from the immobilized polypeptide-antibody complexes and a detection reagent (preferably a second antibody capable of binding to a different site on the polypeptide) containing a reporter group is added. The amount of detection reagent that remains bound to the solid support is then determined using a method appropriate for the specific reporter group.

[1307] More specifically, once the antibody is immobilized on the support as described above, the remaining protein binding sites on the support are typically blocked. Any suitable blocking agent known to those of ordinary skill in the art, such as bovine serum albumin or Tween 20™ (Sigma Chemical Co., St. Louis, Mo.). The immobilized antibody is then incubated with the sample, and polypeptide is allowed to bind to the antibody. The sample may be diluted with a suitable diluent, such as phosphate-buffered saline (PBS) prior to incubation. In general, an appropriate contact time (i.e., incubation time) is a period of time that is sufficient to detect the presence of polypeptide within a sample obtained from an individual with lung cancer. Preferably, the contact time is sufficient to achieve a level of binding that is at least about 95% of that achieved at equilibrium between bound and unbound polypeptide. Those of ordinary skill in the art will recognize that the time necessary to achieve equilibrium may be readily determined by assaying the level of binding that occurs over a period of time. At room temperature, an incubation time of about 30 minutes is generally sufficient.

[1308] Unbound sample may then be removed by washing the solid support with an appropriate buffer, such as PBS containing 0.1% Tween 20™. The second antibody, which contains a reporter group, may then be added to the solid support. Preferred reporter groups include those groups recited above.

[1309] The detection reagent is then incubated with the immobilized antibody-polypeptide complex for an amount of time sufficient to detect the bound polypeptide. An appropriate amount of time may generally be determined by assaying the level of binding that occurs over a period of time. Unbound detection reagent is then removed and bound detection reagent is detected using the reporter group. The method employed for detecting the reporter group depends upon the nature of the reporter group. For radioactive groups, scintillation counting or autoradiographic methods are generally appropriate. Spectroscopic methods may be used to detect dyes, luminescent groups and fluorescent groups. Biotin may be detected using avidin, coupled to a different reporter group (commonly a radioactive or fluorescent group or an enzyme). Enzyme reporter groups may generally be detected by the addition of substrate (generally for a specific period of time), followed by spectroscopic or other analysis of the reaction products.

[1310] To determine the presence or absence of a cancer, such as lung cancer, the signal detected from the reporter group that remains bound to the solid support is generally compared to a signal that corresponds to a predetermined cut-off value. In one preferred embodiment, the cut-off value for the detection of a cancer is the average mean signal obtained when the immobilized antibody is incubated with samples from patients without the cancer. In general, a sample generating a signal that is three standard deviations above the predetermined cut-off value is considered positive for the cancer. In an alternate preferred embodiment, the cut-off value is determined using a Receiver Operator Curve, according to the method of Sackett et al., Clinical Epidemiology: A Basic Science for Clinical Medicine, Little Brown and Co., 1985, p. 106-7. Briefly, in this embodiment, the cut-off value may be determined from a plot of pairs of true positive rates (i.e., sensitivity) and false positive rates (100%-specificity) that correspond to each possible cut-off value for the diagnostic test result. The cut-off value on the plot that is the closest to the upper left-hand corner (i.e., the value that encloses the largest area) is the most accurate cut-off value, and a sample generating a signal that is higher than the cut-off value determined by this method may be considered positive. Alternatively, the cut-off value may be shifted to the left along the plot, to minimize the false positive rate, or to the right, to minimize the false negative rate. In general, a sample generating a signal that is higher than the cut-off value determined by this method is considered positive for a cancer.

[1311] In a related embodiment, the assay is performed in a flow-through or strip test format, wherein the binding agent is immobilized on a membrane, such as nitrocellulose. In the flow-through test, polypeptides within the sample bind to the immobilized binding agent as the sample passes through the membrane. A second, labeled binding agent then binds to the binding agent-polypeptide complex as a solution containing the second binding agent flows through the membrane. The detection of bound second binding agent may then be performed as described above. In the strip test format, one end of the membrane to which binding agent is bound is immersed in a solution containing the sample. The sample migrates along the membrane through a region containing second binding agent and to the area of immobilized binding agent. Concentration of second binding agent at the area of immobilized antibody indicates the presence of a cancer. Typically, the concentration of second binding agent at that site generates a pattern, such as a line, that can be read visually. The absence of such a pattern indicates a negative result. In general, the amount of binding agent immobilized on the membrane is selected to generate a visually discernible pattern when the biological sample contains a level of polypeptide that would be sufficient to generate a positive signal in the two-antibody sandwich assay, in the format discussed above. Preferred binding agents for use in such assays are antibodies and antigen-binding fragments thereof. Preferably, the amount of antibody immobilized on the membrane ranges from about 25 ng to about 1 μg, and more preferably from about 50 ng to about 500 ng. Such tests can typically be performed with a very small amount of biological sample.

[1312] Of course, numerous other assay protocols exist that are suitable for use with the tumor proteins or binding agents of the present invention. The above descriptions are intended to be exemplary only. For example, it will be apparent to those of ordinary skill in the art that the above protocols may be readily modified to use tumor polypeptides to detect antibodies that bind to such polypeptides in a biological sample. The detection of such tumor protein specific antibodies may correlate with the presence of a cancer.

[1313] A cancer may also, or alternatively, be detected based on the presence of T cells that specifically react with a tumor protein in a biological sample. Within certain methods, a biological sample comprising CD4⁺ and/or CD8⁺ T cells isolated from a patient is incubated with a tumor polypeptide, a polynucleotide encoding such a polypeptide and/or an APC that expresses at least an immunogenic portion of such a polypeptide, and the presence or absence of specific activation of the T cells is detected. Suitable biological samples include, but are not limited to, isolated T cells. For example, T cells may be isolated from a patient by routine techniques (such as by Ficoll/Hypaque density gradient centrifugation of peripheral blood lymphocytes). T cells may be incubated in vitro for 2-9 days (typically 4 days) at 37° C. with polypeptide (e.g., 5-25 μg/ml). It may be desirable to incubate another aliquot of a T cell sample in the absence of tumor polypeptide to serve as a control. For CD4⁺ T cells, activation is preferably detected by evaluating proliferation of the T cells. For CD8⁺ T cells, activation is preferably detected by evaluating cytolytic activity. A level of proliferation that is at least two fold greater and/or a level of cytolytic activity that is at least 20% greater than in disease-free patients indicates the presence of a cancer in the patient.

[1314] As noted above, a cancer may also, or alternatively, be detected based on the level of mRNA encoding a tumor protein in a biological sample. For example, at least two oligonucleotide primers may be employed in a polymerase chain reaction (PCR) based assay to amplify a portion of a tumor cDNA derived from a biological sample, wherein at least one of the oligonucleotide primers is specific for (i.e., hybridizes to) a polynucleotide encoding the tumor protein. The amplified cDNA is then separated and detected using techniques well known in the art, such as gel electrophoresis.

[1315] Similarly, oligonucleotide probes that specifically hybridize to a polynucleotide encoding a tumor protein may be used in a hybridization assay to detect the presence of polynucleotide encoding the tumor protein in a biological sample.

[1316] To permit hybridization under assay conditions, oligonucleotide primers and probes should comprise an oligonucleotide sequence that has at least about 60%, preferably at least about 75% and more preferably at least about 90%, identity to a portion of a polynucleotide encoding a tumor protein of the invention that is at least 10 nucleotides, and preferably at least 20 nucleotides, in length. Preferably, oligonucleotide primers and/or probes hybridize to a polynucleotide encoding a polypeptide described herein under moderately stringent conditions, as defined above. Oligonucleotide primers and/or probes which may be usefully employed in the diagnostic methods described herein preferably are at least 10-40 nucleotides in length. In a preferred embodiment, the oligonucleotide primers comprise at least 10 contiguous nucleotides, more preferably at least 15 contiguous nucleotides, of a DNA molecule having a sequence as disclosed herein. Techniques for both PCR based assays and hybridization assays are well known in the art (see, for example, Mullis et al., Cold Spring Harbor Symp. Quant. Biol., 51:263, 1987; Erlich ed., PCR Technology, Stockton Press, NY, 1989).

[1317] One preferred assay employs RT-PCR, in which PCR is applied in conjunction with reverse transcription. Typically, RNA is extracted from a biological sample, such as biopsy tissue, and is reverse transcribed to produce cDNA molecules. PCR amplification using at least one specific primer generates a cDNA molecule, which may be separated and visualized using, for example, gel electrophoresis. Amplification may be performed on biological samples taken from a test patient and from an individual who is not afflicted with a cancer. The amplification reaction may be performed on several dilutions of cDNA spanning two orders of magnitude. A two-fold or greater increase in expression in several dilutions of the test patient sample as compared to the same dilutions of the non-cancerous sample is typically considered positive.

[1318] In another aspect of the present invention, cell capture technologies may be used in conjunction, with, for example, real-time PCR to provide a more sensitive tool for detection of metastatic cells expressing lung tumor antigens. Detection of lung cancer cells in biological samples, e.g., bone marrow samples, peripheral blood, and small needle aspiration samples is desirable for diagnosis and prognosis in lung cancer patients.

[1319] Immunomagnetic beads coated with specific monoclonal antibodies to surface cell markers, or tetrameric antibody complexes, may be used to first enrich or positively select cancer cells in a sample. Various commercially available kits may be used, including Dynabeads® Epithelial Enrich (Dynal Biotech, Oslo, Norway), StemSep™ (StemCell Technologies, Inc., Vancouver, BC), and RosetteSep (StemCell Technologies). A skilled artisan will recognize that other methodologies and kits may also be used to enrich or positively select desired cell populations. Dynabeads® Epithelial Enrich contains magnetic beads coated with MAbs specific for two glycoprotein membrane antigens expressed on normal and neoplastic epithelial tissues. The coated beads may be added to a sample and the sample then applied to a magnet, thereby capturing the cells bound to the beads. The unwanted cells are washed away and the magnetically isolated cells eluted from the beads and used in further analyses.

[1320] RosetteSep can be used to enrich cells directly from a blood sample and consists of a cocktail of tetrameric antibodies that targets a variety of unwanted cells and crosslinks them to glycophorin A on red blood cells (RBC) present in the sample, forming rosettes. When centrifuged over Ficoll, targeted cells pellet along with the free RBC. The combination of antibodies in the depletion cocktail determines which cells will be removed and consequently which cells will be recovered. Antibodies that are available include, but are not limited to: CD2, CD3, CD4, CD5, CD8, CD10, CD11b, CD14, CD15, CD16, CD19, CD20, CD24, CD25, CD29, CD33, CD34, CD36, CD38, CD41, CD45, CD45RA, CD45RO, CD56, CD66B, CD66e, HLA-DR, IgE, and TCRαβ.

[1321] Additionally, it is contemplated in the present invention that MAbs specific for lung tumor antigens can be generated and used in a similar manner. For example, MAbs that bind to tumor-specific cell surface antigens may be conjugated to magnetic beads, or formulated in a tetrameric antibody complex, and used to enrich or positively select metastatic lung tumor cells from a sample. Once a sample is enriched or positively selected, cells may be lysed and RNA isolated. RNA may then be subjected to RT-PCR analysis using lung tumor-specific primers in a real-time PCR assay as described herein. One skilled in the art will recognize that enriched or selected populations of cells may be analyzed by other methods (e.g. in situ hybridization or flow cytometry).

[1322] In another embodiment, the compositions described herein may be used as markers for the progression of cancer. In this embodiment, assays as described above for the diagnosis of a cancer may be performed over time, and the change in the level of reactive polypeptide(s) or polynucleotide(s) evaluated. For example, the assays may be performed every 24-72 hours for a period of 6 months to 1 year, and thereafter performed as needed. In general, a cancer is progressing in those patients in whom the level of polypeptide or polynucleotide detected increases over time. In contrast, the cancer is not progressing when the level of reactive polypeptide or polynucleotide either remains constant or decreases with time.

[1323] Certain in vivo diagnostic assays may be performed directly on a tumor. One such assay involves contacting tumor cells with a binding agent. The bound binding agent may then be detected directly or indirectly via a reporter group. Such binding agents may also be used in histological applications. Alternatively, polynucleotide probes may be used within such applications.

[1324] As noted above, to improve sensitivity, multiple tumor protein markers may be assayed within a given sample. It will be apparent that binding agents specific for different proteins provided herein may be combined within a single assay. Further, multiple primers or probes may be used concurrently. The selection of tumor protein markers may be based on routine experiments to determine combinations that results in optimal sensitivity. In addition, or alternatively, assays for tumor proteins provided herein may be combined with assays for other known tumor antigens.

[1325] The present invention further provides kits for use within any of the above diagnostic methods. Such kits typically comprise two or more components necessary for performing a diagnostic assay. Components may be compounds, reagents, containers and/or equipment. For example, one container within a kit may contain a monoclonal antibody or fragment thereof that specifically binds to a tumor protein. Such antibodies or fragments may be provided attached to a support material, as described above. One or more additional containers may enclose elements, such as reagents or buffers, to be used in the assay. Such kits may also, or alternatively, contain a detection reagent as described above that contains a reporter group suitable for direct or indirect detection of antibody binding.

[1326] Alternatively, a kit may be designed to detect the level of mRNA encoding a tumor protein in a biological sample. Such kits generally comprise at least one oligonucleotide probe or primer, as described above, that hybridizes to a polynucleotide encoding a tumor protein. Such an oligonucleotide may be used, for example, within a PCR or hybridization assay. Additional components that may be present within such kits include a second oligonucleotide and/or a diagnostic reagent or container to facilitate the detection of a polynucleotide encoding a tumor protein.

[1327] The following Examples are offered by way of illustration and not by way of limitation.

### EXAMPLE 1

### Identification and Characterization of Lung Tumor cDNAS

[1328] This Example illustrates the identification of cDNA molecules encoding lung tumor proteins from substracted cDNA libraries. Subtraction techniques normalize differentially expressed cDNAs so that rare transcripts that are over-expressed in lung tumor tissue may be recovered. Expression profiles of the sequences identified from these subtacted libraries were then further analyzed by micrarray analysis. Sequences identified herein are overexpressed in lung tumor or lung tumor and normal lung tissue as compared to other normal tissues. Thus, the cDNAs described herein provide candidates to which therapeutic monoclonal antibodies (naked or conjugated to toxins or radioisotopes) may be targeted. In addition these candidates may also be targets for therapeutic vaccines and can be used as diagnostic markers for the detection and monitoring of lung cancer.

[1329] A. Isolation of cDNA Sequences from Lung Adenocarcinoma Libraries Using Conventional cDNA Library Subtraction

[1330] A human lung adenocarcinoma cDNA expression library was constructed from poly A⁺ RNA from patient tissues (#40031486) using a Superscript Plasmid System for cDNA Synthesis and Plasmid Cloning kit (BRL Life Technologies, Gaithersburg, Md.) following the manufacturer's protocol. Specifically, lung carcinoma tissues were homogenized with polytron (Kinematica, Switzerland) and total RNA was extracted using Trizol reagent (BRL Life Technologies) as directed by the manufacturer. The poly A⁺ RNA was then purified using an oligo dT cellulose column as described in Sambrook et al., Molecular Cloning: A Laboratory Manual, Cold Spring Harbor Laboratories, Cold Spring Harbor, N.Y., 1989. First-strand cDNA was synthesized using the NotI/Oligo-dT18 primer. Double-stranded cDNA was synthesized, ligated with BstXI/EcoRI adaptors (Invitrogen, San Diego, Calif.) and digested with NotI. Following size fractionation with cDNA size fractionation columns (BRL Life Technologies), the cDNA was ligated into the BstXI/NotI site of pcDNA3.1 (Invitrogen) and transformed into ElectroMax E. coli DH10B cells (BRL Life Technologies) by electroporation. A total of 3×10⁶ independent colonies were generated.

[1331] Using the same procedure, a normal human cDNA expression library was prepared from a panel of normal tissue specimens, including lung, liver, pancreas, skin, kidney, brain and resting PBMC.

[1332] cDNA library subtraction was performed using the above lung adenocarcinoma and normal tissue cDNA libraries, as described by Hara et al. (Blood, 84:189-199, 1994) with some modifications. Specifically, a lung adenocarcinoma-specific subtracted cDNA library was generated as follows. The normal tissue cDNA library (80 μg) was digested with BamHI and XhoI, followed by a filling-in reaction with DNA polymerase Klenow fragment. After phenol-chloroform extraction and ethanol precipitation, the DNA was dissolved in 133 μl of H₂O, heat-denatured and mixed with 133 μl (133 μg) of Photoprobe biotin (Vector Laboratories, Burlingame, Calif.). As recommended by the manufacturer, the resulting mixture was irradiated with a 270 W sunlamp on ice for 20 minutes. Additional Photoprobe biotin (67 μl) was added and the biotinylation reaction was repeated. After extraction with butanol five times, the DNA was ethanol-precipitated and dissolved in 23 μl H₂O. The resulting DNA, plus other highly redundant cDNA clones that were frequently recovered in previous lung subtractions formed the driver DNA.

[1333] To form the tracer DNA, 10 μg lung adenocarcinoma cDNA library was digested with NotI and SpeI, phenol chloroform extracted and passed through Chroma spin-400 columns (Clontech, Palo Alto, Calif.). Typically, 5 μg of cDNA was recovered after the sizing column. Following ethanol precipitation, the tracer DNA was dissolved in 5 μl H₂O. Tracer DNA was mixed with 15 μl driver DNA and 20 μl of 2× hybridization buffer (1.5 M NaCl/10 mM EDTA/50 mM HEPES pH 7.5/0.2% sodium dodecyl sulfate), overlaid with mineral oil, and heat-denatured completely. The sample was immediately transferred into a 68° C. water bath and incubated for 20 hours (long hybridization [LH]). The reaction mixture was then subjected to a streptavidin treatment followed by phenol/chloroform extraction. This process was repeated three more times. Subtracted DNA was precipitated, dissolved in 12 μl H₂O, mixed with 8 μl driver DNA and 20 μl of 2× hybridization buffer, and subjected to a hybridization at 68° C. for 2 hours (short hybridization [SH]). After removal of biotinylated double-stranded DNA, subtracted cDNA was ligated into NotI/SpeI site of chloramphenicol resistant pBCSK⁺ (Stratagene, La Jolla, Calif.) and transformed into ElectroMax E. coli DH10B cells by electroporation to generate a lung adenocarcinoma specific subtracted cDNA library, referred to as LAT-S1 Similarly, LAT-S2 was generated by including 23 genes that were over-expressed in the tracer as additional drivers.

[1334] A second human lung adenocarcinoma cDNA expression library was constructed using adenocarcinoma tissue from a second patient (#86-66) and used to prepare a second lung adenocarcinoma-specific subtracted cDNA library (referred to as LAT2-S2), as described above, using the same panel of normal tissues and the additional genes over-expressed in LAT-S1.

[1335] A third human metastatic lung adenocarcinoma library was constructed from a pool of two lung pleural effusions with lung and gastric adenocarcinoma origins. The subtracted cDNA library, referred to as Mets-sub2, was generated as described above using the same panel of normal tissues. The Mets-sub3 subtracted library was constructed by including 51 additional genes as drivers. These 51 genes were recovered in Mets-sub2, representing over-expressed housekeeping genes in the testers.

[1336] A total of 16 cDNA fragments isolated from LAT-S1, 585 cDNA fragments isolated from LAT-S2, 568 cDNA clones from LAT2-S2, 15 cDNA clones from Mets-sub2 and 343 cDNA clones from Mets-sub3, described above, were colony PCR amplified and their mRNA expression levels in lung tumor, normal lung, and various other normal and tumor tissues were determined using microarray technology (Incyte, Palo Alto, Calif.). Briefly, the PCR amplification products were dotted onto slides in an array format, with each product occupying a unique location in the array. mRNA was extracted from the tissue sample to be tested, reverse transcribed, and fluorescent-labeled cDNA probes were generated. The microarrays were probed with the labeled cDNA probes, the slides scanned and fluorescence intensity was measured. This intensity correlates with the hybridization intensity. Seventy-three non-redundant cDNA clones, of which 42 were found to be unique, showed over-expression in lung tumors, with expression in normal tissues tested (lung, skin, lymph node, colon, liver, pancreas, breast, heart, bone marrow, large intestine, kidney, stomach, brain, small intestine, bladder and salivary gland) being either undetectable, or at significantly lower levels compared to lung adenocarcinoma tumors. These clones were further characterized by DNA sequencing with a Perkin Elmer/Applied Biosystems Division Automated Sequencer Model 373A and/or Model 377 (Foster City, Calif.).

[1337] The sequences were compared to known sequences in the gene bank using the EMBL GenBank databases (release 96). No significant homologies were found to the sequence provided in SEQ ID NO:67, with no apparent homology to previously identified expressed sequence tags (ESTs). The sequences of SEQ ID NO:60, 62, 65, 66, 69-71, 74, 76, 79, 80, 84, 86, 89-92, 95, 97 and 98 were found to show some homology to previously identified expressed sequence tags (ESTs). The cDNA sequences of SEQ ID NO:59, 61, 63, 64, 67, 68, 72, 73, 75, 77, 78, 81-83, 85, 87, 88, 93, 94, 96, 99 and 100 showed homology to previously identified genes. The full-length cDNA sequences for the clones of SEQ ID NO:96 and 100 are provided in SEQ ID NO:316 and 318, respectively. The amino acid sequences for the clones of SEQ ID NO:59, 61, 63, 64, 68, 73, 82, 83, 94, 96 and 100 are provided in SEQ ID NO:331, 328, 329, 332, 327, 333, 330, 326, 325, 324 and 335, respectively. The amino acid sequence encoded by the sequence of SEQ ID NO:69 (referred to as L552S) is provided in SEQ ID NO:786.

[1338] Further studies led to the isolation of an extended cDNA sequence and the open reading frame for L552S (SEQ ID NO:790). The amino acid sequence encoded by the cDNA sequence of SEQ ID NO:790 is provided in SEQ ID NO:791. Subsequent studies led to the isolation of the full-length cDNA sequence of L552S (SEQ ID NO:808). The full-length cDNA of L552S has an open-reading frame of 480 base pairs (SEQ ID NO:790) and encodes a putative polypeptide of 160 amino acids (SEQ ID NO:809).

[1339] Initial database searches failed to detect any sequence homology with proteins in the database, suggesting that L552S encodes a novel protein of unknown function. Recently, a cancer-testis antigen, XAGE-1, was found to be over-expressed in Ewing's Sarcoma (Liu et al., 2000 Cancer Res. 60:4752-4755). The determined cDNA sequence of XAGE-1 is provided in SEQ ID NO:792 with the corresponding amino acid sequence being provided in SEQ ID NO:793. A sequence comparison of L552S and XAGE-1 reveals striking identities as well as differences. The majority of the C-terminal sequences are identical to each other. The polypeptides predicted from L552S and XAGE-1 have diverged N-terminal sequences. Hydrophilicity analysis of the L552S amino acids suggested a very hydrophilic protein with no transmembrane domains predicted. PSORT analysis of L552S revealed the same result. Since L552S is also localized in chromosome X, it is likely to be a new isoform of cancer testis antigen, XAGE-1. The genomic sequence analysis revealed that both genes localized in the same region of the X chromosome and both have four exons. The last three exons are identical for L552S and XAGE-1. However, the first exon for XAGE-1 is upstream of the first exon for L552S and this results in distinct 5′ nucleotide and amino acid sequences for L552S and XAGE-1. Therefore, L552S and XAGE-1 are alternatively spliced isoforms.

[1340] The amino acid sequence of this N-terminal portion of L552S is provided in SEQ ID NO:1830 with the corresponding cDNA sequence being provided in SEQ ID NO:1826. The cDNA sequences provided in SEQ ID NO:1827-1829 represent bp 394-681 of SEQ ID NO:808, bp 394-534 of SEQ ID NO:808 and bp 214-394 of SEQ ID NO:792, respectively, with the corresponding amino acid sequences being provided in SEQ ID NO:1831-1833, respectively.

[1341] Full-length cloning efforts on L552S also led to the isolation of three additional cDNA sequences (SEQ ID NO:810-812; referred to as clones 50989, 50990 and 50992, respectively) from a metastatic lung adenocarcinoma library. The sequence of SEQ ID NO:810 was found to show some homology to previously identified human DNA sequences. The sequence of SEQ ID NO:811 was found to show some homology to a previously identified DNA sequence. The sequence of SEQ ID NO:812 was found to show some homology to previously identified ESTs.

[1342] The gene of SEQ ID NO:84 (referred to as L551 S) was determined by real-time RT-PCR analysis to be over-expressed in 2/9 primary adenocarcinomas and to be expressed at lower levels in 2/2 metastatic adenocarcinomas and 1/2 squamous cell carcinomas. No expression was observed in normal tissues, with the exception of very low expression in normal stomach. Further studies on L551S led to the isolation of the 5′ and 3′ cDNA consensus sequences provided in SEQ ID NO:801 and 802, respectively. The L551S 5′ sequence was found to show some homology to the previously identified gene STY8 (cDNA sequence provided in SEQ ID NO:803; corresponding amino acid sequence provided in SEQ ID NO:805), which is a mitogen activated protein kinase phosphatase. However, no significant homologies were found to the 3′ sequence of L551S. Subsequently, an extended cDNA sequence for L551S was isolated (SEQ ID NO:804). The corresponding amino acid sequence is provided in SEQ ID NO:806. Further studies led to the isolation of two independent full-length clones for L551S (referred to as 54298 and 54305). These two clones have five nucleotide differences compared to the STY8 DNA sequence. Two of these differences are single nucleotide polymorphisms which do not effect the encoded amino acid sequences. The other three nucleotide differences are consistent between the two L551S clones but lead to encoded amino acid sequences that are different from the STY8 protein sequence. The determined cDNA sequences for the L551 S full-length clones 54305 and 54298 are provided in SEQ ID NO:825 and 826, respectively, with the amino acid sequence for L551 S being provided in SEQ ID NO:827.

[1343] B. Isolation of cDNA Sequences from Lung Adenocarcinoma Libraries using PCR-Based cDNA Library Subtraction

[1344] cDNA clones from a subtracted library, containing cDNA from a pool of two human lung primary adenocarcinomas subtracted against a pool of nine normal human tissue cDNAs including skin, colon, lung, esophagus, brain, kidney, spleen, pancreas and liver, (Clontech, Palo Alto, Calif.) were submitted to a first round of PCR amplification. This library (referred to as ALT-1) was subjected to a second round of PCR amplification, following the manufacturer's protocol. The expression levels of 760 cDNA clones in lung tumor, normal lung, and various other normal and tumor tissues, were examined using microarray technology as described above. A total of 118 clones, of which 55 were unique, were found to be over-expressed in lung tumor tissue, with expression in normal tissues tested (lung, skin, lymph node, colon, liver, pancreas, breast, heart, bone marrow, large intestine, kidney, stomach, brain, small intestine, bladder and salivary gland) being either undetectable, or at significantly lower levels. The sequences were compared to known sequences in the gene bank using the EMBL and GenBank databases (release 96). No significant homologies (including ESTs) were found to the sequence provided in SEQ ID NO:44. The sequences of SEQ ID NO:1, 11, 13, 15, 20, 23-27, 29, 30, 33, 34, 39, 41, 43, 45, 46, 51 and 57 were found to show some homology to previously identified expressed sequence tags (ESTs). The cDNA sequences of SEQ ID NO:2-10, 12, 14, 16-19, 21, 22, 28, 31, 32, 35-38, 40, 42, 44, 47-50, 52-56 and 58 showed homology to previously identified genes. The full-length cDNA sequences for the clones of SEQ ID NO:18, 22, 31, 35, 36 and 42 are provided in SEQ ID NO:320, 319, 323, 321, 317, 321 and 322, respectively, with the corresponding amino acid sequences being provided in SEQ ID NO:337, 336, 340, 338, 334, and 339, respectively.

[1345] Further studies led to the isolation of an extended cDNA sequence for the clone of SEQ ID NO:33 (referred to as L801P). This extended cDNA sequence (provided in SEQ ID NO:796), was found to contain three potential open reading frames (ORFs). The predicted amino acid sequences encoded by these three ORFs are provided in SEQ ID NO:797-799, respectively. Additional full-length cloning efforts led to still further extended cDNA sequence for L801P, set forth in SEQ ID NO:1669, in addition to five potential open reading frames (referred to as ORFs 4-9; SEQ ID NO:1670-1675, respectively) encoded by the extended cDNA sequence. L801P was mapped to chromosomal region 20p13 and a 137 amino acid ORF from this genomic region was identified that corresponds to ORF4 (SEQ ID NO:1670), suggesting that this is likely an authentic ORF for L801P.

[1346] By microarray analysis, L801P was found to be overexpressed by 2-fold or greater in lung tumor tissue compared to normal tissue. By real-time PCR analysis, greater than 50% of lung adenocarcinoma and greater than 30% of lung squamous cell carcinoma tumor samples tested had elevated L801P expression relative to normal lung tissue. Of those that displayed elevated L801 P, the level of expression was greater than 10-fold higher than in normal lung tissue samples. Moreover, low or no expression of L801P was detected in an extensive panel of normal tissue RNAs.

[1347] L801P expression was also detected in a number of other tumor types, including breast, prostate, ovarian and colon tumors, and thus may have diagnostic and/or therapeutic utility in these cancer types.

[1348] In subsequent studies, a full-length cDNA sequence for the clone of SEQ ID NO:44 (referred to as L844P) was isolated (provided in SEQ ID NO:800). Comparison of this sequence with those in the public databases revealed that the 470 bases at the 5′ end of the sequence show homology to the known gene dihydrodiol dehydrogenase, thus indicating that L844P is a novel transcript of the dihydrodiol dehydrogenase family having 2007 base pairs of previously unidentified 3′ untranslated region.

[1349] The predicted amino acid sequence encoded by the sequence of SEQ ID NO:46 (referred to as L840P) is provided in SEQ ID NO:787. An extended cDNA sequence for L840P, which was determined to include an open reading frame, is provided in SEQ ID NO:794. The predicted amino acid sequence encoded by the cDNA sequence of SEQ ID NO:794 is provided in SEQ ID NO:795. The full-length cDNA sequence for the clone of SEQ ID NO:54 (referred to as L548S) is provided in SEQ ID NO:788, with the corresponding amino acid sequence being provided in SEQ ID NO:789.

[1350] Northern blot analyses of the genes of SEQ ID NO:25 and 46 (referred to as L839P and L840P, respectively) were remarkably similar. Both genes were expressed in 1/2lung adenocarcinomas as two bands of 3.6 kb and 1.6 kb. No expression of L839P was observed in normal lung or trachea. No expression of L840P was observed in normal bone marrow, resting or activated PBMC, esophagus, or normal lung. Given the similar expression patterns, L839P and L840P may be derived from the same gene.

[1351] Additional lung adenocarcinoma cDNA clones were isolated as follows. A cDNA library was prepared from a pool of two lung adenocarcinomas and subtracted against cDNA from a panel of normal tissues including lung, brain, liver, kidney, pancreas, skin, heart and spleen. The subtraction was performed using a PCR-based protocol (Clontech), which was modified to generate larger fragments. Within this protocol, tester and driver double stranded cDNA were separately digested with five restriction enzymes that recognize six-nucleotide restriction sites (MluI, MscI, PvuII, SalI and StuI). This digestion resulted in an average cDNA size of 600 bp, rather than the average size of 300 bp that results from digestion with RsaI according to the Clontech protocol. The ends of the restriction digested tester cDNA were filled in to generate blunt ends for adapter ligation. This modification did not affect the subtraction efficiency. Two tester populations were then created with different adapters, and the driver library remained without adapters. The tester and driver libraries were then hybridized using excess driver cDNA. In the first hybridization step, driver was separately hybridized with each of the two tester cDNA populations. This resulted in populations of (a) unhybridized tester cDNAs, (b) tester cDNAs hybridized to other tester cDNAs, (c) tester cDNAs hybridized to driver cDNAs and (d) unhybridized driver cDNAs. The two separate hybridization reactions were then combined, and rehybridized in the presence of additional denatured driver cDNA. Following this second hybridization, in addition to populations (a) through (d), a fifth population (e) was generated in which tester cDNA with one adapter hybridized to tester cDNA with the second adapter. Accordingly, the second hybridization step resulted in enrichment of differentially expressed sequences which could be used as templates for PCR amplification with adaptor-specific primers.

[1352] The ends were then filled in, and PCR amplification was performed using adaptor-specific primers. Only population (e), which contained tester cDNA that did not hybridize to driver cDNA, was amplified exponentially. A second PCR amplification step was then performed, to reduce background and further enrich differentially expressed sequences.

[1353] Fifty-seven cDNA clones were isolated from the subtracted library (referred to as LAP1) and sequenced. The determined cDNA sequences for 16 of these clones are provided in SEQ ID NO:101-116. The sequences of SEQ ID NO:101 and 114 showed no significant homologies to previously identified sequences. The sequences of SEQ ID NO:102-109 and 112 showed some similarity to previously identified sequences, while the sequences of SEQ ID NO:113, 115 and 116 showed some similarity to previously isolated ESTs.

[1354] An additional 502 clones analyzed from the LAP1 library were sequenced and the determined cDNA sequences are shown in SEQ ID NO:828-1239 and 1564-1653.

[1355] C. Isolation of cDNA Sequences from Small Cell Lung Carcinoma Libraries using PCR-Based cDNA Library Subtraction

[1356] A subtracted cDNA library for small cell lung carcinoma (referred to as SCL1) was prepared essentially using the modified PCR-based subtraction process described above. cDNA from small cell lung carcinoma was subtracted against cDNA from a panel of normal tissues, including normal lung, brain, kidney, liver, pancreas, skin, heart, lymph node and spleen. Both tester and driver poly A+ RNA were initially amplified using SMART PCR cDNA synthesis kit (Clontech, Palo Alto, Calif.). The tester and driver double stranded cDNA were separately digested with five restriction enzymes (DraI, MscI, PvuII, SmaI, and StuI). These restriction enzymes generated blunt end cuts and the digestion resulted in an average insert size of 600 bp. Digestion with this set of restriction enzymes eliminates the step required to generate blunt ends by filling in of the cDNA ends. These modifications did not affect subtraction efficiency.

[1357] Eighty-five clones were isolated and sequenced. The determined cDNA sequences for 31 of these clones are provided in SEQ ID NO:117-147. The sequences of SEQ ID NO:122, 124, 126, 127, 130, 131, 133, 136, 139 and 147 showed no significant homologies to previously identified sequences. The sequences of SEQ ID NO:120, 129, 135, 137, 140, 142, 144 and 145 showed some similarity to previously identified gene sequences, while the sequences of SEQ ID NO:114, 118, 119, 121, 123, 125, 128, 132, 134, 138, 141, 143 and 147 showed some similarity to previously isolated ESTs.

[1358] In further studies, three additional cDNA libraries were generated from poly A+ RNA from a single small cell lung carcinoma sample subtracted against a pool of poly A+ RNA from nine normal tissues (lung, brain, kidney, liver, pancreas, skin, heart pituitary gland and spleen). For the first library (referred to as SCL2), the subtraction was carried out essentially as described above for the LAP1 library, with the exception that the tester and driver were digested with PvuII, StuI, MscI and DraI. The ratio of tester and driver cDNA used was as recommended by Clontech. For the second library (referred to as SCL3), subtraction was performed essentially as for SCL2 except that cDNA for highly redundant clones identified from the SCL2 library was included in the driver cDNA. Construction of the SCL4 library was performed essentially as described for the SCL3 library except that a higher ratio of driver to tester was employed.

[1359] Each library was characterized by DNA sequencing and database analyses. The determined cDNA sequence for 35 clones isolated from the SCL2 library are provided in SEQ ID NO:245-279, with the determined cDNA sequences for 21 clones isolated from the SCL3 library and for 15 clones isolated from the SCL4 library being provided in SEQ ID NO:280-300 and 301-315, respectively. The sequences of SEQ ID NO:246, 254, 261, 262, 304, 309 and 311 showed no significant homologies to previously identified sequences. The sequence of SEQ ID NO:245, 248, 255, 266, 270, 275, 280, 282, 283, 288-290, 292, 295, 301 and 303 showed some homology to previously isolated ESTs, while the sequences of SEQ ID NO:247, 249-253, 256-260, 263-265, 267-269, 271-274, 276-279, 281, 284-287, 291, 293, 294, 296-300, 302, 305-308, 310 and 312-315 showed some homology to previously identified gene sequences.

[1360] Sequences disclosed herein were firtjer evaluated for overexpression in specific tumor tissues by microarray analysis. Using this approach, cDNA sequences were PCR amplified and their mRNA expression profiles in tumor and normal tissues were examined using cDNA microarray technology essentially as described (Shena, M. et al., 1995 Science 270:467-70). In brief, the clones were arrayed onto glass slides as multiple replicas, with each location corresponding to a unique cDNA clone (as many as 5500 clones can be arrayed on a single slide or chip). Each chip was hybridized with a pair of cDNA probes that are fluorescence-labeled with Cy3 and Cy5, respectively. Typically, 1 μg of polyA⁺ RNA was used to generate each cDNA probe. After hybridization, the chips were scanned and the fluorescence intensity recorded for both Cy3 and Cy5 channels. There were multiple built-in quality control steps. First, the probe quality was monitored using a panel of ubiquitously expressed genes. Secondly, the control plate also can include yeast DNA fragments of which complementary RNA may be spiked into the probe synthesis for measuring the quality of the probe and the sensitivity of the analysis. Currently, the technology offers a sensitivity of 1 in 100,000 copies of mRNA. Finally, the reproducibility of this technology can be ensured by including duplicated control cDNA elements at different locations.

[1361] 3264 cDNA clones from three PCR-based subtracted cDNA libraries were analyzed by the above cDNA microarray technology. The cDNA clones were arrayed on Lung Chip 5. Of the these cDNA clones, 960 clones came from SQL1 library, 768 clones came from SCL1 library, and 1536 clones came from SCL3 and SCL4 libraries. Thirty-five pairs of fluorescent labeled cDNA probes were used for the microarray analysis. Each probe pair included a lung tumor probe paired with a normal tissue probe. The expression data was analyzed. 498 cDNA clones were found to be overexpressed by 2-fold or greater in the small cell and/or non-small cell lung tumor probe groups compared to the normal tissue probe group. Also, the mean expression values for these clones in normal tissues were below 0.1 (range of expression is from 0.001 to 10). The cDNA sequences disclosed in SEQ ID NO:1240-1563 represent 324 non-redundant clones.

[1362] The following sequences were novel based on database analysis including GenBank and GeneSeq: SEQ ID NO:1240, 1243, 1247, 1269, 1272, 1280, 1283, 1285, 1286, 1289, 1300, 1309, 1318, 1319, 1327, 1335, 1339, 1346, 1359, 1369, 1370, 1371, 1393, 1398, 1405, 1408, 1413, 1414, 1417, 1422, 1429, 1432, 1435, 1436, 1438-1442, 1447, 1450, 1453, 1463, 1467, 1470, 1473, 1475, 1482, 1486, 1491-1494, 1501, 1505, 1506, 1514-1517, 1520, 1522, 1524, 1535, 1538, 1542, 1543, 1547, 1554, 1557, 1559, 1561, and 1563.

[1363] The extended cDNA sequence of the partial sequence of contig 139 (SEQ ID NO:1467), also known as L985P, was predicted by searching public databases using SEQ ID NO:1467 as a query. By this approach, it was found that SEQ ID NO:1467 had homology to a cDNA sequence (SEQ ID NO:1676) which encodes the cell surface immunomodulator-2 (CSIMM-2). The cDNA sequence of SEQ ID NO:1676 encodes a protein having the sequence set forth in SEQ ID NO:1677.

[1364] By microarray analysis, L985P was overexpressed by 2-fold or greater in the lung tumor probe groups compared to the normal tissue probe group. Moreover, the mean expression values for L985P in normal tissues was below 0.2 (range of expression was from 0.01 to 10). By real-time PCR analysis, greater than 40% of small cell lung carcinoma lung tumor samples tested had elevated L985P expression relative to normal lung tissue. Of those that displayed elevated L985P, the level of expression was greater than 3-fold higher than in normal lung tissue samples. Low or no expression of L985P was detected in an extensive panel of normal tissue RNAs. These findings for L985P support its use both as a diagnositic marker for detecting the presence of lung cancer in a patient and/or as an immunotherapeutic target for the treatment of lung cancer.

[1365] D. Isolation of cDNA Sequences from a Neuroendocrine Library using PCR-Based cDNA Library Subtraction

[1366] Using the modified PCR-based subtraction process, essentially as described above for the LAP1 subtracted library, a subtracted cDNA library (referred to as MLN1) was derived from a lung neuroendocrine carcinoma that had metastasized to the subcarinal lymph node, by subtraction with a panel of nine normal tissues, including normal lung, brain, kidney, liver, pancreas, skin, heart, lymph node and spleen.

[1367] Ninety-one individual clones were isolated and sequenced. The determined cDNA sequences for 58 of these clones are provided in SEQ ID NO:147-222. The sequences of SEQ ID NO:150, 151, 154, 157, 158, 159, 160, 163, 174, 175, 178, 186-190, 192, 193, 195-200, 208-210, 212-215 and 220 showed no significant homologies to previously identified sequences. The sequences of SEQ ID NO:152, 155, 156, 161, 165, 166, 176, 179, 182, 184, 185, 191, 194, 221 and 222 showed some similarity to previously identified gene sequences, while the sequences of SEQ ID NO:148, 149, 153, 164, 167-173, 177, 180, 181, 183, 201-207, 211 and 216-219 showed some similarity to previously isolated ESTs.

[1368] The determined cDNA sequences of an additional 442 clones isolated from the MLN1 library are provided in SEQ ID NO:341-782, with the determined cDNA sequences of an additional 11 clones isolated from the MLN1 library are provided in SEQ ID NO:1654-1664.

[1369] E. Isolation of cDNA Sequences from a Squamous Cell Lung Carcinoma Library using PCR-Based cDNA Library Subtraction

[1370] A subtracted cDNA library for squamous cell lung carcinoma (referred to as SQL1) was prepared essentially using the modified PCR-based subtraction process described above, except the tester and driver double stranded cDNA were separately digested with four restriction enzymes (DraI, MscI, PvuII and StuI). cDNA from a pool of two squamous cell lung carcinomas was subtracted against cDNA from a pool of 10 normal tissues, including normal lung, brain, kidney, liver, pancreas, skin, heart, spleen, esophagus and trachea.

[1371] Seventy-four clones were isolated and sequenced. The determined cDNA sequences for 22 of these clones are provided in SEQ ID NO:223-244. The sequence of SEQ ID NO:241 showed no significant homologies to previously identified sequences. The sequences of SEQ ID NO:223, 225, 232, 233, 235, 238, 239, 242 and 243 showed some similarity to previously identified gene sequences, while the sequences of SEQ ID NO:224, 226-231, 234, 236, 237, 240, 241 and 244 showed some similarity to previously isolated ESTs.

[1372] The sequences of an additional 12 clones isolated during characterization of cDNA libraries prepared from lung tumor tissue are provided in SEQ ID NO:813-824. Comparison of these sequences with those in the GenBank database and the GeneSeq DNA database revealed no significant homologies to previously identified sequences.

### EXAMPLE 2

### Synthesis of Polypeptides

[1373] Polypeptides may be synthesized on a Perkin Elmer/Applied Biosystems Division 430A peptide synthesizer using FMOC chemistry with HPTU (O-Benzotriazole-N,N,N′,N′-tetramethyluronium hexafluorophosphate) activation. A Gly-Cys-Gly sequence may be attached to the amino terminus of the peptide to provide a method of conjugation, binding to an immobilized surface, or labeling of the peptide. Cleavage of the peptides from the solid support may be carried out using the following cleavage mixture: trifluoroacetic acid:ethanedithiol:thioanisole:water:phenol (40:1:2:2:3). After cleaving for 2 hours, the peptides may be precipitated in cold methyl-t-butyl-ether. The peptide pellets may then be dissolved in water containing 0.1% trifluoroacetic acid (TFA) and lyophilized prior to purification by C18 reverse phase HPLC. A gradient of 0%-60% acetonitrile (containing 0.1% TFA) in water (containing 0.1% TFA) may be used to elute the peptides. Following lyophilization of the pure fractions, the peptides may be characterized using electrospray or other types of mass spectrometry and by amino acid analysis.

### EXAMPLE 3

### Expression in E. coli of L548S His Tag Fusion Protein

[1374] The L548S coding region was PCR amplified with the following primers:

[1375] Forward primer starting at amino acid 2:

[1376] PDM-433: 5′ gctaaaggtgaccccaagaaaccaaag 3′ Tm 60° C. (SEQ ID NO:1665)

[1377] Reverse primer creating a XhoI site after the stop codon:

[1378] PDM-438: 5′ctattaactcgagggagacagataaacagtttcttta 3′ Tm 61° C. (SEQ ID NO:1666)

[1379] The PCR product was then digested with XhoI restriction enzyme, gel purified and then cloned into pPDM His, a modified pET28 vector with a His tag in frame, which had been digested with Eco72I and XhoI restriction enzymes. The correct construct was confirmed by DNA sequence analysis and then transformed into BL21 (DE3) pLys S and BL21 (DE3) CodonPlus RIL expression hosts. The protein sequence of expressed recombinant L548S is shown in SEQ ID NO:1667, and the DNA sequence of expressed recombinant L7548S is shown in SEQ ID NO:1668.

### EXAMPLE 4

### Additional Analyses of Lung Chip 5 SQL1, SCL1, SCL3 and SCL4 Libraries

[1380] This example describes the identification of additional cDNA cones that are over-expressed in lung carcinomas. The sequences identified herein have utility in immunotherapeutic and/or diagnostic applications.

[1381] Additional analyses were performed on lung chip 5 using a criteria of greater than or equal to 2-fold over-expression in tumor probe groups versus normal tissues and an average expression in normal tissues of less than or equal to 0.2. This resulted in the identification of 109 non-redundant clones that are over-expressed in lung carcinomas. As summarized in the Table 11 below, 19 cDNA clones were recovered from the lung squamous cell carcinoma subtracted library SQL1, 9 cDNA clones were recovered from the small cell lung carcinoma library SCL1, and 81 cDNA clones were recovered from the small cell lung carcinoma libraries SCL3 and SCL4.

TABLE 11

| SEQ ID | | | | | Mean | Mean | |
|---|---|---|---|---|---|---|---|
| NO: | Seq. Ref. | Element (384) | Element (96) | Ratio | Signal 1 | Signal 2 | Library |
| 1680 | 58456 | p0003r03c13 | R0001 E7 | 3.09 | 0.424 | 0.137 | SQL1 |
| 1681 | 58458 | p0003r03c10 | R0001 F5 | 2.31 | 0.408 | 0.176 | SQL1 |
| 1682 | 58462 | p0003r04c16 | R0001 H8 | 2.22 | 0.257 | 0.116 | SQL1 |
| 1683 | 58469 | p0003r07c12 | R0002 F6 | 2.1 | 0.289 | 0.138 | SQL1 |
| 1684 | 58470 | p0003r09c21 | R0003 A11 | 2.55 | 0.493 | 0.194 | SQL1 |
| 1685 | 58482 | p0003r12c19 | R0003 G10 | 2.16 | 0.36 | 0.167 | SQL1 |
| 1686 | 58485 | p0003r12c10 | R0003 H5 | 2.48 | 0.273 | 0.11 | SQL1 |
| 1687 | 58501 | p0004r04c23 | R0005 G12 | 2.04 | 0.26 | 0.128 | SQL1 |
| 1688 | 58502 | p0004r04c03 | R0005 G2 | 2.17 | 0.289 | 0.133 | SQL1 |
| 1689 | 58505 | p0004r05c23 | R0006 A12 | 3.08 | 0.454 | 0.148 | SQL1 |
| 1690 | 58507 | p0004r06c11 | R0006 C6 | 3.22 | 0.49 | 0.152 | SQL1 |
| 1691 | 58509 | p0004r07c15 | R0006 E8 | 3.26 | 0.421 | 0.129 | SQL1 |
| 1692 | 58512 | p0004r09c03 | R0007 A2 | 3.16 | 0.559 | 0.177 | SQL1 |
| 1693 | 58527 | p0004r12c22 | R0007 H11 | 2.03 | 0.278 | 0.137 | SQL1 |
| 1694 | 58529 | p0004r14c09 | R0008 C5 | 2.26 | 0.45 | 0.199 | SQL1 |
| 1695 | 58531 | p0004r16c01 | R0008 G1 | 2.84 | 0.387 | 0.136 | SQL1 |
| 1696 | 58537 | p0005r02c08 | R0009 D4 | 2.03 | 0.355 | 0.175 | SQL1 |
| 1697 | 58539 | p0005r03c08 | R0009 F4 | 2.34 | 0.42 | 0.18 | SQL1 |
| 1698 | 58545 | p0005r07c21 | R0010 E11 | 2.96 | 0.361 | 0.122 | SQL1 |
| 1699 | 59319 | p0005r10c04 | R0011 D2 | 3.1 | 0.478 | 0.154 | SCL1 |
| 1700 | 59322 | p0005r12c01 | R0011 G1 | 2.16 | 0.255 | 0.118 | SCL1 |
| 1701 | 59348 | p0006r11c12 | R0015 F6 | 2.33 | 0.269 | 0.116 | SCLI |
| 1702 | 59350 | p0006r14c13 | R0016 C7 | 2.41 | 0.447 | 0.185 | SCL1 |
| 1703 | 59363 | p0007r02c16 | R0017 D8 | 2.12 | 0.421 | 0.199 | SCL1 |
| 1704 | 59365 | p0007r03c20 | R0017 F10 | 3.07 | 0.584 | 0.19 | SCL1 |
| 1705 | 59370 | p0007r04c10 | R0017 H5 | 2.06 | 0.284 | 0.138 | SCL1 |
| 1706 | 59373 | p0007r05c23 | R0018 A12 | 2.95 | 0.472 | 0.16 | SCL1 |
| 1707 | 59376 | p0007r06c02 | R0018 D1 | 2.13 | 0.246 | 0.116 | SCL1 |
| 1708 | 61050 | p0011r02c10 | R0033 D5 | 2.23 | 0.306 | 0.137 | SCL3/4 |
| 1709 | 61051 | p0011r03c23 | R0033 E12 | 2.9 | 0.298 | 0.103 | SCL3/4 |
| 1710 | 61052 | p0011r03c08 | R0033 F4 | 2.18 | 0.265 | 0.122 | SCL3/4 |
| 1711 | 61054 | p0011r03c16 | R0033 F8 | 2.11 | 0.415 | 0.197 | SCL3/4 |
| 1712 | 61056 | p0011r04c13 | R0033 G7 | 2.73 | 0.314 | 0.115 | SCL3/4 |
| 1713 | 61057 | p0011r04c10 | R0033 H5 | 2.45 | 0.463 | 0.189 | SCL3/4 |
| 1714 | 61060 | p0011r05c11 | R0034 A6 | 3.28 | 0.536 | 0.164 | SCL3/4 |
| 1715 | 61062 | p0011r06c21 | R0034 C11 | 2.73 | 0.526 | 0.192 | SCL3/4 |
| 1716 | 61063 | p0011r06c05 | R0034 C3 | 3.61 | 0.513 | 0.142 | SCL3/4 |
| 1717 | 61064 | p0011r06c04 | R0034 D2 | 2.58 | 0.477 | 0.185 | SCL3/4 |
| 1718 | 61065 | p0011r06c14 | R0034 D7 | 4.91 | 0.55 | 0.112 | SCL3/4 |
| 1719 | 61066 | p0011r06c18 | R0034 D9 | 2.38 | 0.285 | 0.12 | SCL3/4 |
| 1720 | 61069 | p0011r07c16 | R0034 F8 | 2.25 | 0.426 | 0.189 | SCL3/4 |
| 1721 | 61070 | p0011r08c21 | R0034 G11 | 2 | 0.234 | 0.117 | SCL3/4 |
| 1722 | 61071 | p0011r08c03 | R0034 G2 | 2.76 | 0.321 | 0.116 | SCL3/4 |
| 1723 | 61074 | p0011r08c16 | R0034 H8 | 3.02 | 0.399 | 0.132 | SCL3/4 |
| 1724 | 61075 | p0011r09c05 | R0035 A3 | 3.83 | 0.498 | 0.13 | SCL3/4 |
| 1725 | 61077 | p0011r10c21 | R0035 C11 | 2.12 | 0.306 | 0.144 | SCL3/4 |
| 1726 | 61079 | p0011r11c23 | R0035 E12 | 2.04 | 0.22 | 0.108 | SCL3/4 |
| 1727 | 61080 | p0011r11c15 | R0035 E8 | 2.76 | 0.299 | 0.108 | SCL3/4 |
| 1728 | 61081 | p0011r11c14 | R0035 F7 | 2.37 | 0.303 | 0.128 | SCL3/4 |
| 1729 | 61083 | p0011r12c15 | R0035 G8 | 2.29 | 0.351 | 0.153 | SCL3/4 |
| 1730 | 61085 | p0011r13c05 | R0036 A3 | 2.62 | 0.43 | 0.164 | SCL3/4 |
| 1731 | 61086 | p0011r13c09 | R0036 A5 | 2.53 | 0.398 | 0.157 | SCL3/4 |
| 1732 | 61088 | p0011r14c05 | R0036 C3 | 4.26 | 0.702 | 0.165 | SCL3/4 |
| 1733 | 61090 | p0011r15c07 | R0036 E4 | 3.16 | 0.429 | 0.136 | SCL3/4 |
| 1734 | 61091 | p0011r16c16 | R0036 H8 | 3.54 | 0.634 | 0.179 | SCL3/4 |
| 1735 | 61093 | p0012r02c03 | R0037 C2 | 2.2 | 0.265 | 0.121 | SCL3/4 |
| 1736 | 61094 | p0012r02c11 | R0037 C6 | 15.17 | 1.79 | 0.118 | SCL3/4 |
| 1737 | 61096 | p0012r02c08 | R0037 D4 | 2.44 | 0.27 | 0.111 | SCL3/4 |
| 1738 | 61097 | p0012r02c10 | R0037 D5 | 4.52 | 0.81 | 0.179 | SCL3/4 |
| 1739 | 61099 | p0012r03c02 | R0037 F1 | 3.34 | 0.39 | 0.117 | SCL3/4 |
| 1740 | 61100 | p0012r03c06 | R0037 F3 | 2.03 | 0.233 | 0.114 | SCL3/4 |
| 1741 | 61103 | p0012r04c17 | R0037 G9 | 2.48 | 0.413 | 0.167 | SCL3/4 |
| 1742 | 61105 | p0012r05c11 | R0038 A6 | 3.26 | 0.501 | 0.154 | SCL3/4 |
| 1743 | 61106 | p0012r05c08 | R0038 B4 | 2.46 | 0.354 | 0.144 | SCL3/4 |
| 1744 | 61110 | p0012r06c15 | R0038 C8 | 2.18 | 0.41 | 0.188 | SCL3/4 |
| 1745 | 61113 | p0012r07c09 | R0038 E5 | 2.47 | 0.376 | 0.152 | SCL3/4 |
| 1746 | 61115 | p0012r07c13 | R0038 E7 | 2.57 | 0.483 | 0.188 | SCL3/4 |
| 1747 | 61117 | p0012r07c24 | R0038 F12 | 2.18 | 0.235 | 0.108 | SCL3/4 |
| 1748 | 61118 | p0012r07c18 | R0038 F9 | 4.44 | 0.605 | 0.136 | SCL3/4 |
| 1749 | 61119 | p0012r08c03 | R0038 G2 | 2.97 | 0.35 | 0.118 | SCL3/4 |
| 1750 | 61120 | p0012r08c07 | R0038 G4 | 2.23 | 0.323 | 0.144 | SCL3/4 |
| 1751 | 61122 | p0012r08c18 | R0038 H9 | 2.23 | 0.373 | 0.168 | SCL3/4 |
| 1752 | 61125 | p0012r10c17 | R0039 C9 | 2.1 | 0.22 | 0.105 | SCL3/4 |
| 1753 | 61126 | p0012r10c16 | R0039 D8 | 2.47 | 0.345 | 0.14 | SCL3/4 |
| 1754 | 61130 | p0012r12c12 | R0039 H6 | 2.66 | 0.282 | 0.106 | SCL3/4 |
| 1755 | 61133 | p0012r13c24 | R0040 B12 | 2.25 | 0.27 | 0.12 | SCL3/4 |
| 1756 | 61134 | p0012r14c23 | R0040 C1 | 22.23 | 0.228 | 0.102 | SCL3/4 |
| 1757 | 61135 | p0012r14c03 | R0040 C2 | 2.05 | 0.298 | 0.146 | SCL3/4 |
| 1758 | 61137 | p0012r14c02 | R0040 D1 | 8.63 | 1.463 | 0.17 | SCL3/4 |
| 1759 | 61139 | p0012r14c14 | R0040 D7 | 2.69 | 0.3 | 0.111 | SCL3/4 |
| 1760 | 61143 | p0012r16c02 | R0040 H1 | 2.55 | 0.318 | 0.125 | SCL3/4 |
| 1761 | 61144 | p0012r16c18 | R0040 H9 | 2.85 | 0.318 | 0.112 | SCL3/4 |
| 1762 | 61148 | p0013r02c19 | R0041 C10 | 2.33 | 0.463 | 0.199 | SCL3/4 |
| 1763 | 61151 | p0013r02c03 | R0041 C2 | 2.25 | 0.336 | 0.149 | SCL3/4 |
| 1764 | 61155 | p0013r04c07 | R0041 G4 | 2.13 | 0.366 | 0.171 | SCL3/4 |
| 1765 | 61156 | p0013r05c05 | R0042 A3 | 2.73 | 0.38 | 0.139 | SCL3/4 |
| 1766 | 61159 | p0013r06c24 | R0042 D12 | 4.57 | 0.831 | 0.182 | SCL3/4 |
| 1767 | 61160 | p0013r07c19 | R0042 E10 | 8.6 | 1.191 | 0.138 | SCL3/4 |
| 1768 | 61163 | p0013r07c18 | R0042 F9 | 2.18 | 0.278 | 0.128 | SCL3/4 |
| 1769 | 61167 | p0013r10c12 | R0043 D6 | 3.13 | 0.39 | 0.124 | SCL3/4 |
| 1770 | 61172 | p0013r12003 | R0043 G2 | 2 | 0.396 | 0.198 | SCL3/4 |
| 1771 | 61173 | p0013r12c07 | R0043 G4 | 3.73 | 0.72 | 0.193 | SCL3/4 |
| 1772 | 61176 | p0013r13c04 | R0044 B2 | 2.34 | 0.446 | 0.19 | SCL3/4 |
| 1773 | 61177 | p0013r14c01 | R0044 C1 | 3.9 | 0.539 | 0.138 | SCL3/4 |
| 1774 | 61183 | p0013r15c14 | R0044 F7 | 5.49 | 0.959 | 0.175 | SCL3/4 |
| 1775 | 61185 | p0013r16c24 | R0044 H12 | 2.25 | 0.409 | 0.182 | SCL3/4 |
| 1776 | 61188 | p0014r01c07 | R0045 A4 | 2.14 | 0.271 | 0.127 | SCL3/4 |
| 1777 | 61192 | p0014r02c19 | R0045 C10 | 2.33 | 0.321 | 0.138 | SCL3/4 |
| 1778 | 61198 | p0014r04c24 | R0045 H12 | 2.3 | 0.321 | 0.14 | SCL3/4 |
| 1779 | 61201 | p0014r06c22 | R0046 D11 | 2.43 | 0.269 | 0.111 | SCL3/4 |
| 1780 | 61202 | p0014r06c08 | R0046 D4 | 2.57 | 0.346 | 0.135 | SCL3/4 |
| 1781 | 61204 | p0014r07c07 | R0046 E4 | 4.27 | 0.516 | 0.121 | SCL3/4 |
| 1782 | 61206 | p0014r07c12 | R0046 F6 | 2.18 | 0.364 | 0.167 | SCL3/4 |
| 1783 | 61210 | p0015r09c02 | R0051 B1 | 2.43 | 0.463 | 0.19 | SCL3/4 |
| 1784 | 61212 | p0015r10c15 | R0051 C8 | 2.64 | 0.406 | 0.154 | SCL3/4 |
| 1785 | 61216 | p0015r11c16 | R0051 F8 | 2.28 | 0.278 | 0.122 | SCL3/4 |
| 1786 | 61225 | p0015r14c12 | R0052 C6 | 2.25 | 0.25 | 0.111 | SCLS/4 |
| 1787 | 61226 | p0015r14c14 | R0052 D7 | 2.54 | 0.3 | 0.118 | SCL3/4 |
| 1788 | 61227 | p0015r16c18 | R0052 H9 | 2.06 | 0.312 | 0.151 | SCL3/4 |

[1382] The ratio of signal 1 to signal 2 in the table above provides a measure of the level of expression of the identified sequences in tumor versus normal tissues. For example, for SEQ ID NO:1669, the tumor-specific signal was 3.09 times that of the signal for the normal tissues tested; for SEQ ID NO:1670, the tumor-specific signal was 2.31 times that of the signal for normal tissues, etc.

### EXAMPLE 5

### Real-Time PCR Analyses of Lung Tumor Sequences

[1383] Real-time PCR was performed on a subset of the lung tumor sequences disclosed herein in order to further evaluate their expression profiles in various tumor and normal tissues. Briefly, quantitation of PCR product relies on the few cycles where the amount of DNA amplifies logarithmically from barely above the background to the plateau. Using continuous fluorescence monitoring, the threshold cycle number where DNA amplifies logarithmically is easily determined in each PCR reaction. There are two fluorescence detecting systems. One is based upon a double-strand DNA specific binding dye SYBR Green I dye. The other uses TaqMan probe containing a Reporter dye at the 5′ end (FAM) and a Quencher dye at the 3′ end (TAMRA) (Perkin Elmer/Applied Biosystems Division, Foster City, Calif.). Target-specific PCR amplification results in cleavage and release of the Reporter dye from the Quencher-containing probe by the nuclease activity of AmpliTaq Gold™ (Perkin Elmer/Applied Biosystems Division, Foster City, Calif.). Thus, fluorescence signal generated from released reporter dye is proportional to the amount of PCR product. Both detection methods have been found to generate comparable results. To compare the relative level of gene expression in multiple tissue samples, a panel of cDNAs is constructed using RNA from tissues and/or cell lines, and real-time PCR is performed using gene specific primers to quantify the copy number in each cDNA sample. Each cDNA sample is generally performed in duplicate and each reaction repeated in duplicated plates. The final Real-time PCR result is typically reported as an average of copy number of a gene of interest normalized against internal actin number in each cDNA sample. Real-time PCR reactions may be performed on a GeneAmp 5700 Detector using SYBR Green I dye or an ABI PRISM 7700 Detector using the TaqMan probe (Perkin Elmer/Applied Biosystems Division, Foster City, Calif.). Results obtained from real-time PCR analysis of a number of lung tumor-specific sequences disclosed herein are summarized in the table below. In addition, extended cDNA sequences for many of these clones were obtained by searching public sequence databases. The extended sequences, and the proteins encoded by those sequences, are identified by SEQ ID NO: in Table 12 below.

TABLE 12

| | | | | | Extended | Encoded |
|---|---|---|---|---|---|---|
| | Clone | Clone | SEQ ID | | cDNA | Polypeptide |
| Library | Name | No. | NO: | Real-Time PCR Results | Sequence | Sequence |
| SQL1 | L972P | 47988 | 1789 | Overexpressed in 1/7 lung squamous | | |
| | | | | tumor, 1/3 HN squamous tumor. Low or | | |
| | | | | no expression in normal tissues. | | |
| SQL1 | L979P | 48005 | 1790 | Over-expressed in 2/7 squamous lung | 1791 | 1806 |
| | | | | tumors, 1/3 HN squamous tumors, 1/2 | | |
| | | | | adeno lung tumors. Low or no | | |
| | | | | expression in normal tissues. | | |
| SQL1 | L970P | 49853 | 1269 | Highly overexpressed in 1/7 lung | | |
| | | | | squamous tumors and 1/3 HN | | |
| | | | | squamous tumor. Low or no expression | | |
| | | | | in normal tissues. | | |
| SQL1 | L981P | 49865 | 1272 | Over-expressed in 1/6 squamous lung | | |
| | | | | and 1/3 HN squamous tumors. Low or | | |
| | | | | no expression in normal tissues. | | |
| SQL1 | L980P | 49826 | 1279 | Over-expressed in 3/7 squamous lung | 1792 | 1807 |
| | | | | tumors, 1/3 HN squamous tumors, 1/2 | | |
| | | | | adeno lung tumors. Low or no | | |
| | | | | expression in normal tissues. | | |
| SCL1 | L973P | 20631 | 117 | Over-expressed in atypical carcinoid | 1793 | 1808 |
| | | | | METs and adenocarcinoma. Expression | | |
| | | | | in several normal tissues. | | |
| SCL1 | L974P | 20661 | 128 | Over-expressed in primary small cell, | 1794 | 1809 |
| | | | | squamous and adenocarcinomas. | | |
| | | | | Expression observed in several normal | | |
| | | | | tissues. | | |
| SCL1 | L996P | 50430 | 1442 | Over-expressed in 2/2 Primary Small | 1795 | 1810 |
| | | | | Cell, 6/6 Small Cell Cell Lines, 1/1 | | |
| | | | | Atypical Carc. METs, 1/1 Adeno, 1/1 | | |
| | | | | Squamous. Very low or no expression | | |
| | | | | in normal tissues. | | |
| SCL3 | L977P | 26961 | 288 | Over-expressed in 1/2 Primary Small | 1796 | 1811 |
| | | | | Cell, 1/6 Small Cell-Cell Line, and 1/1 | | |
| | | | | Carcinoid Mets. Very low or no | | |
| | | | | expression in normal tissues. | | |
| SCL2 | L978P | 24928 | 1339 | Over-expressed in 212 primary small | 1797 | 1812 |
| | | | | cell, 3/6 small cell-cell lines, 1/1 | | |
| | | | | carcinoid mets., adeno and squamous | | |
| | | | | tumor pools; Low or no expression in | | |
| | | | | normal tissues. | | |
| SCL3/4 | L984P | 50507 | 1446 | Highly expressed in 1/2 primary small | 1798 | 1813 |
| | | | | cell tumors and 4/6 small cell tumor | | |
| | | | | cell lines. Low or no expression in | | |
| | | | | normal tissues. | | |
| SCL3/4 | L580S | 50536 | 1449 | Over-expressed in select small cell and | | |
| | | | | squamous tumors. Some expression | | |
| | | | | observed normal brain, bronchiol, soft | | |
| | | | | palate and trachea. | | |
| SCL3/4 | L988P | 50645 | 1531 | Over-expressed in 1/2 Primary Small | 1799 | 1814 |
| | | | | Cell, 1/2 Primary Small Cell, 6/6 Small | | |
| | | | | Cell-Cell Lines, 1/1 Carcinoid Mets., | | |
| | | | | Adeno & Squamous Tumor pool. | | |
| | | | | Expressed in some normal tissues | | |
| | | | | (brain, adrenal gland, salivary gland, | | |
| | | | | trachea, thymus). | | |
| SCL3/4 | L1423P | 50625 | 1533 | Over-expressed in 1/2 primary small | 1800 | 1815 |
| | | | | cell, 5/6 small cell-cell lines, 1/1 | | |
| | | | | carcinoid mets. Also expressed in | | |
| | | | | normal brain and pituitary gland. | | |
| SCL3/4 | L986P | 50483 | 1490 | Over-expressed in 1/2 primary small | | |
| | | | | cell, 5/6 small cell-cell lines, 1/1 | | |
| | | | | carcinoid mets., adeno and squamous | | |
| | | | | tumor pool. Expressed in normal brain, | | |
| | | | | pituitary gland and spinal cord. | | |
| SCL3/4 | L987P | 50560 | 1527 | Over-expression in 1/2 Primary Small | 1801 | 1816-1818 |
| | | | | Cell, 6/6 Small Cell-Cell Lines, 1/1 | | |
| | | | | Carcinoid Mets. Expression in normal | | |
| | | | | pituitary and adrenal glands. | | |
| SCL3/4 | L1424P | 50639 | 1547 | Over-expression in 1/2 Primary Small | | |
| | | | | Cell and 1/1 Carcinoid Mets. Low or no | | |
| | | | | expression in normal tissues. | | |
| MLN1 | L997P | 26749 | 730 | Over-expression in 1/1 atypical | | |
| | | | | carcinoid METs. No expression in | | |
| | | | | normal tissues. | | |
| MLN1 | L999P | 26752 | 733 | Over-expressed in 2/2 Primary Small | | |
| | | | | Cell, 6/6 Small Cell Cell Lines, 1/1 | | |
| | | | | Atypical Carc. METs. Expression in | | |
| | | | | several normal tissues. | | |
| MLN1 | L1400P | 26529 | 405 | Over-expressed in 2/6 Small Cell Cell | | |
| | | | | Lines and 2/2 Primary Small Cell. | | |
| | | | | Moderate to low expression in several | | |
| | | | | normal tissues. | | |
| MLN1 | L998P | 27699 | 468 | Over-expression in 1/1 Atypical | 1802 | 1819 |
| | | | | Carcinoid METs. Low expression in | | |
| | | | | normal tissues. | | |
| | | | | Over-expressed in 4/7 squamous | 1803 | 1820 |
| | | | | tumors, 1/2 adenocarcinoma tumors | | |
| LAP1 | L1425P | 59303 | 949 | and in a pool of six small cell lung | | |
| | | | | carcinomas. Moderate to high | | |
| | | | | expression observed in normal brain, | | |
| | | | | kidney and skeletal muscle. | | |
| LAP1 | L1426P | 59314 | 1156 | Highly overexpressed in one lung | 1804 | 1821 |
| | | | | squamous tumor and one HN | | |
| | | | | squamous tumor. Very low or no | | |
| | | | | expression observed in normal tissues. | | |
| LAP1 | L1427P | 59298 | 921 | Highly over-expressed in 3/12 | 1805 | 1822 |
| | | | | adenocarcinoma tumors. Very low or no | | |
| | | | | expression in normal tissues. | | |
| LAP1 | L1428P | 59316 | 1180 | Over-expressed in 4/12 | | |
| | | | | adenocarcinoma tumors and lower level | | |
| | | | | expression in several other | | |
| | | | | adenocarcinoma tumors. Very low or no | | |
| | | | | expression in normal tissues. | | |

### EXAMPLE 6

### Identification of CD4 Immunogenic T Cell Epitopes Derived from Lung Tumor Antigens

[1384] This example describes the identification of specific epitopes recognized by L548S antigen-specific T cells. These experiments demonstrate the immunogenicity of the L548S protein and support its use as a target for vaccine and/or other immunotherapeutic approaches. Further, the above experiments identify specific epitopes of the L548S protein that may be of particular importance in the deveolpment of such approaches.

[1385] CD4 T cell lines specific for the antigen L548S (SEQ ID NO:789) were generated as follows.

[1386] A series of overlapping 20-mer peptides were synthesized that spanned the entire L548S sequence (SEQ ID NO:1834-1856, respectively). For priming, peptides were combined into pools of 4-5 peptides and cultured at 2 micrograms/ml with dendritic cells and purified CD4+ T cells in 96 well U-bottomed plates. One hundred cultures were generated for each peptide pool. Cultures were restimulated weekly with fresh dendritic cells loaded with peptide pools. Following a total of 3 stimulation cycles, cells were rested for an additional week and tested for specificity to antigen presenting cells (APC) pulsed with peptide pools using interferon-gamma ELISA and proliferation assays. For these assays, adherent monocytes loaded with either the relevant peptide pool, recombinant L548S or an irrelevant peptide were used as antigen presenting cells (APC). As shown in Table 13, below, a number of CD4 T cell lines demonstrated reactivity with the priming peptides as well as recombinant L548S protein. These lines were further expanded to be tested for recognition of individual peptides from the pools, as well as for recognition of recombinant L548S.

[1387] The dominant reactivity of these lines appeared to be with peptide 21 (SEQ ID NO:1854), which corresponds to amino acids 161-180 of L548S.

[1388] Thus, the above experiments demonstrate the immunogenicity of the L548S protein and further, identify specific epitopes of the L548S protein that may be of particular importance in the deveolpment of vaccine and/or other immunotherapeutic approaches.

TABLE 13

| Stimulation | | Proliferation (CPM) | | | | |
|---|---|---|---|---|---|---|
| | Positive | No | | | Stimulation Index | |
| Peptides | cell lines | antigen | Peptides | L548S | Peptides | L548S |
| p1-5 | B1 | 700 | 14891 | 8791 | 21 | 13 |
| | B2 | 1135 | 48724 | 53944 | 42 | 47 |
| | G2 | 1227 | 7609 | 3193 | 6 | 3 |
| p6-10 | | | | | | |
| p11-15 | E2 | 8315 | 33723 | 13391 | 4 | 2 |
| | E4 | 22097 | 100040 | 44171 | 5 | 2 |
| p16-19 | | | | | | |
| p20-23 | E3 | 3937 | 45367 | 15524 | 11 | 4 |
| | F4 | 2648 | 130947 | 12927 | 49 | 5 |

### EXAMPLE 7

### Detection of Antibodies Against Lung Tumor Antigens in Patient Sera

[1389] This example identifies the presence of L548S antibodies in lung cancer patients. The data described herein show that L548S is immunogenic and support its use to generate therapeutic B cell immune responses in vivo.

[1390] Antibodies specific for the lung tumor antigens L548S (SEQ ID NO:789), and L552S (SEQ ID NO:809) were shown to be present in effusion fluid or sera of lung cancer patients but not in normal donors. More specifically, the presence of antibodies against L548S, L551S (SEQ ID NO:827) and L552S in effusion fluid obtained from lung cancer patients and in sera from normal donors was examined by ELISA using recombinant proteins and HRP-conjugated anti-human Ig. Briefly, each protein (100 ng) was coated in a 96-well plate at pH 9.5. In parallel, BSA (bovine serum albumin) was also coated as a control protein. The signals ([S], absorbance measured at 405 nm) against BSA ([N]) were determined. The results of these studies are shown in Table 14, wherein − represents [S]/[N]<2; +/− represents [S]/[N]>2; ++ represents [S]/[N]>3; and +++ represents [S]/[N]>5.

TABLE 14
Detection of Antibodies against Lung Tumor Antigens

| | L548S | L551S | L552S |
|---|---|---|---|
| Effusion fluid | | | |
| #1 | +/− | − | − |
| #2 | − | − | − |
| #3 | − | − | +++ |
| #4 | − | − | − |
| #5 | +/− | − | − |
| #7 | − | − | − |
| #8 | − | − | +/− |
| #10 | − | − | +/− |
| #11 | − | − | − |
| #12 | = | − | +/− |
| #13 | − | − | − |
| #14 | +/− | − | +/− |
| #15 | − | − | − |
| #17 | − | − | ++ |
| #18 | − | − | − |
| #19 | − | − | ++ |
| #20 | − | − | − |
| Normal sera | | | |
| #21 | − | − | − |
| #22 | − | − | − |
| #23 | − | − | − |
| #24 | − | − | − |
| #25 | − | − | − |

[1391] Using Western blot analyses, antibodies against L552S were found to present in 1 out of 4 samples of effusion fluid from lung cancer patients, with no L552S antibodies being detected in the three samples of normal sera tested.

### EXAMPLE 8

### Fusion Proteins of Lung Tumor Antigens

[1392] Fusion proteins of full-length Ra12 with either L801P ORF4 (SEQ ID NO:1670) or L801P ORF5 (SEQ ID NO:1671) were prepared and expressed as single recombinant proteins in E. coli as follows.

[1393] The cDNA for ORF4 of L801P was obtained by PCR with a cDNA for the full length L801P and the primers of SEQ ID NO:1857 and 1858. The cDNA for ORF5 of L801P was obtained by PCR with a cDNA for the full length L801P and the primers of SEQ ID NO:1859 and 1860. The PCR products with expected size were recovered from agarose gel, digested with restriction enzymes EcoRI and XhoI, and cloned into the corresponding sites in the expression vector pCRX1 for subsequent expression in E. coli. For the fusion of Ra12 with ORF4, the best expression was obtained in HMS 174(DE3)pLysS in 2xYS media, with recombinant protein being induced using IPTG at 37° C. for approximately 3 hours. For the fusion of Ra12 with ORF5, the best expression was obtained in HMS174(DE3)pLysS in 2xYS media, again with recombinant protein being induced using IPTG at 37° C. for approximately 3 hours. The plasmids used for the fusion protein production were confirmed by DNA sequencing. The determined cDNA sequences for the ORF4 and ORF5 fusions are provided in SEQ ID NO:1861 and 1862, respectively, with the corresponding amino acid sequences being provided in SEQ ID NO:1863 and 1864, respectively.

### EXAMPLE 9

### Cloning of cDNA Encoding Full-Length L984P

[1394] The example illustrates the isolation of cDNA sequences encoding L984P by PCR amplication from four separate cDNA sources. Briefly, an earlier isolated cDNA sequence of clone L984P was identified as having homology to a DNA sequence that encodes human achaete-scute homolog 1 (ASH1). Gene specific primers were made using the sequence information present in the public domain for ASH1 (genbank acc. NM-004316). Using these gene specific primers in PCR amplification, L984P was cloned from four separate cDNA sources. The four cDNA sources were a small cell lung carcinoma primary tumor sample (RNA Id. 573A), a METs neuroendocrine a typical carcinoid sample (RNA Id. 512A), and two small cell lung carcinoma cell lines (cell-line Id. NCI H128 and DMS79). The determined cDNA sequences for these four clones are provided in SEQ ID NO:1865-1868, respectively. The coding region of the cDNA contains a repeat of the triplet CAG that exhibits polymorphism in the human genomic DNA. This polymorphism can be observed in L984P cloned from the four different sources as well as from the cDNA of ASH1 and that derived from the human chromosome 4. The cDNA of ASH1 (genbank Acc. NM-006688) deposited in the genbank database contains 14 copies of the triple CAG, whereas the cDNA sequence derived from the human chromosome 4 sequence (genbank Acc. XM_{—}006688) contains 12 copies of the triplet. The cDNA cloned from 573A and 512A both contain 12 copies of the CAG triplet. The cDNA cloned from the small cell lung carcinoma cell line DMS79 contains 13 copies of the triplet CAG, while the cDNA cloned from the small cell lung carcinoma cell line NCI H128 contains only 10 copies of the triplet CAG. As the polymorphism is present in the coding region, this results in polymorphisms in the protein sequences as well (see, SEQ ID NO:1869-1872).

### EXAMPLE 10

### Cloning of cDNA Encoding Full-Length L985P

[1395] As previously disclosed in Example 1C, a search of the public databases using the sequence for contig 139 (SEQ ID NO:1467, also known as L985P) as the query was conducted and showed that this sequence had homology to the cDNA (SEQ ID NO:1676) encoding the cell surface immunomodulator-2 (CSIMM-2, sequence obtained from the Geneseq database). The full-length sequence of the clone was obtained by screening a small cell lung carcinoma cDNA library with a radioactively labeled probe of the original cloned sequence (SEQ ID NO:1467). Approximately 500,000 clones from the cDNA library were screened and 2 independent clones containing cDNA insert of 1.35 kb were isolated. The full-length cDNA sequence is provided in SEQ ID NO:1873 and the encoded amino acid sequence is provided in SEQ ID NO:1874. Surprisingly, an alignment of the isolated full-length cDNA sequence of L985P (SEQ ID NO:1873) with the Geneseq database sequence for CSIMM-2 showed that L985P differs from the GeneSeq database sequence by one nucleotide. This nucleotide difference results in a change of one amino acid residue at position 119 (G to E) of SEQ ID NO:1874.

[1396] The predicted protein structure and sequence of L985P indicates that it is a member of the recently described MS4A (membrane-spanning 4-domain, subfamily A) gene family (Liang and Tedder, 2001 Genomics 72:119-127). The MS4A gene family currently consists of at least 21 distinct human and mouse proteins of which nine members are from humans. These include CD20, FcεR1β, HTm4, MS4A4A, MS4A5, MS4A6A, MS4A7, MS4A8B (same as L985P) and MS4A12. The MS4A family members are cell surface expressed proteins containing four transmembrane spanning domains, with N- and C-terminal regions facing the cytoplasmic side of the cells. The human MS4A family members exhibit 20-40% overall homology at the protein level, which is confined mostly to the transmembrane domains. The transmembrane domains of L985P share the highest homology to CD20 with approximately 40% identity and 60% similarity between the two protein sequences in this region. The MS4A family members demonstrate a broad tissue distribution with expression observed in diverse cell types in hematopoetic and nonhematopoetic tissues. However, expression of some MS4A family members is highly restricted to a particular cell type, such as CD20, which is only expressed on B-cells. As also mentioned in Example 1C, L985P (MS4A8B) is over-expressed in small cell lung carcinoma (SCLC) as determined by quantitative real-time PCR. Low level expression is seen in some normal tissues including lung, pituitary gland, stomach, colon, and trachea, while expression in other normal tissues checked was negligible or undetectable (see, Example 1C).

[1397] The physiological function for most of the MS4A family members remains to be elucidated. Previous studies have shown that CD20 is functionally important for the regulation of cell growth and differentiation, and signal transduction in B-cells. There is also evidence that CD20 may serve as a calcium channel by forming a homo- or heterotetrameric complex. FcεRIβ is part of a tetrameric receptor complex, which mediates interaction with IgE-bound antigens that lead to cellular responses such as the degranulation of mast cells. Because of the sequence and structural homologies between the MS4A family members, it is highly likely that they will share overlapping functional properties.

[1398] Some of the MS4A family members have been found to be associated with cancer. CD20 is expressed in more than 90% of B-cell non-Hodgkin lymphomas, which has made it an ideal target for immunotherapeutic approaches for the treatment of B-cell malignancies. Anti-CD20 monoclonal antibodies have been used with high success in the treatment of non-Hodgkin-lymphomas in both naïve and radiolabeled forms. The anti-CD20 MAbs have been shown to exert their antitumor effects through several pathways, which include complement-mediated cytolysis, antibody-mediated cellular cytotoxicity and antibody-mediated cell cycle arrest and apoptosis. Analysis of the human EST databases indicates that other members of the MS4A gene family including MS4A4A, A6A, A7 and A8B are also expressed in various cancers including lung, breast, pancreas, colon, ovary, kidney and brain. By comparison to CD20, one or more of the MS4A family genes would be used as targets for immunotherapeutic approaches for the treatment of hematopoetic and nonhematopoetic malignancies.

[1399] The MS4A protein family members are structurally similar to other membrane protein families with four transmembrane domains. These include the Tetraspanin protein family (TM4SF) and the GABA-A receptor protein family. Tetraspanins are associated with cancer and may play a direct role in controlling tumor progression. Although CD9 expression will positively influence B cell migration, CD9 overexpression suppresses motility and metastasis in carcinoma cells and there is an inverse correlation with metastasis in melanoma. However, CD9 is also expressed on 90% of non-T cell acute lymphoblastic leukemia cells and 50% of chronic lymphocytic leukemias. A recent study using RT-PCR analysis of tetraspanin expression in Burkitt lymphoma cell lines found that 90% of the lines express CD53, CD81, CD63, CD82 and SAS at high levels. CD151/PETA3 is an effector of metastasis and cell migration and MAbs that block this activity have been developed. Similarly, overexpression of the tetraspanin CO-029/D6.1 will increase the metastatic potential of cell lines. The tetraspanins control a diverse set of biological functions that can be regulated by MAbs. The functions of the tetraspanins, in general, can be grouped into actions that affect cell activation and proliferation, as well as adhesion and motility. These functions tend to be carried out by their association with integrins. The functional activity of tetraspanins can be modulated with MAbs in such a way as to control cell proliferation. For example, CD81/TAPA-1 is associated with B cell activation and increased proliferation, an activity that can be blocked with MAbs. MAbs with anti-proliferative activity have been generated to the tetraspanin family member CO-029/D6.1.

[1400] As mentioned above, L985P is specifically over-expressed in small cell lung carcinomas. This fact and a comparison to CD20, tetraspanins and Her2 whose over-expression in cancers makes them effective cancer therapeutic targets, indicate that L985P may be a good target for immunotherapeutic approaches for the treatment of small cell lung carcinomas.

[1401] To facilitate the generation, purification, and evaluation of MAb against L985P, MAbs against the entire deduced amino acid sequence of the L985P protein, peptides derived from L985P or chemically produced (synthetic) L985P peptides will be used. Also, one can use MAbs raised against chimeric forms of L985P protein molecule fused to Ra12 protein, either the long form (Ra12—which is the first 128 amino acids of Ra12) and/or the short form (Ra12S), or fused to a polyhistidine peptide or any combination of these molecules. Provided are the predicted cDNA and amino acid sequences for the his-tagged L985P-Ra12 fusion molecules: Ra12-L985P_cDNA (SEQ ID NO:1875), Ra12-L985P_Protein (SEQ ID NO:1876), Ra12S-L985P_cDNA (SEQ ID NO:1877) and Ra12S-L985P_Protein (SEQ ID NO:1878); and the L985P derived peptides: his-tagged Ra12S-L985PEx_cDNA (SEQ ID NO:1879), his-tagged Ra12S-L985PEx_Protein (SEQ ID NO:1880), L985P_Extracellular_Loop-2_cDNA (SEQ ID NO:1881) and L985P_Extracellular_Loop-2_Peptide (SEQ ID NO:1882).

### EXAMPLE 11

### Expression in E. coli of a His-Tagged RA12-L985P Fusion Protein

[1402] This example sets forth a specific embodiment of a fusion between Ra12 and L985P and its expression in E. coli. A his-tagged fusion protein of the long-form of Ra12 and all but the first three amino acid residues of L985P was expressed as a single recombinant protein in E. coli. The long-form of Ra12 was modified from the original sequence of amino acid residues 192-323 of MTA32A in that a putative thrombin cleavage site was replaced with a HindIII restriction site. The L985P was fused downstream of the Ra12 sequence in a pCRX1 vector. The Ra12 sequence was cloned downstream of the RBS. As a result, a his-tagged fusion protein is produced when the recombinant vector is expressed in E. coli. The sequence for the fusion of the long-form of Ra12 and L985P was confirmed by DNA sequencing. The determined cDNA sequence is provided in SEQ ID NO:1875 as this sequence is the same as that predicted in Example 10.

### EXAMPLE 12

### Cloning of cDNA Encoding Full-Length L1428P

[1403] As previously disclosed in Example 5, real-time PCR was performed on a subset of the lung tumor sequences disclosed herein in order to further evaluate their expression profiles in various tumor and normal tissues. The results are provided above in Table 12. One of the sequences analyzed was from clone #59316 (SEQ ID NO:1180, L1428P) and was shown to be expressed in a subset of lung adenocarcinomas.

[1404] Further studies have isolated the full-length cDNA for the cloned sequence of #59316 (SEQ ID NO:1180, L1428P). In order to determine the transcript size of the gene, a multiple tissue Northern blot was probed with the radioactively labeled original cloned sequence (SEQ ID NO:1180). The Northern blot included about 20 ug of total RNA from lung adenocarcinoma and normal tissues samples. Visual analysis of the exposed film revealed a single transcript of approximately 6.5-7.0 kb. The full-length sequence of the clone was obtained by screening a lung adenocarcinoma primary tumor cDNA library with a radioactively labeled probe of the original cloned sequence (SEQ ID NO:1180). Approximately 500,000 clones from the cDNA library were screened and 5 independent clones containing a cDNA insert of 6.8 kb were isolated. This insert size is similar to the size estimated by Northern-blot analysis. The full-length sequence is provided in SEQ ID NO:1883. Although no distinct ORF could be identified, seven potential ORFs can be predicted and the amino acid sequences of these potential ORFs, designated L1428P_ORF1 to ORF7, are provided in SEQ ID NO:1884-1890, respectively. The expression of full-length L1428P was re-analyzed by real-time PCR as set forth in Example 5 on extended cDNA panels for both lung adenocarcinomas and squamous cell carcinomas. The lung adenocarcinoma extended panel real-time results again confirm the expression of L1428P in adenocarcinoma with about 40-50% of the adenocarcinoma samples showing varying levels of expression. The real-time results from the squamous cell carcinoma extended panel shows that L1428P is also expressed in lung squamous cell carcinoma. However, the expression was in fewer lung squamous cell carcinoma samples and at a lower level.

### EXAMPLE 13

### Real-Time PCR Analysis of cDNA Sequences Which are Over-Expressed in Lung Tumors as Shown by Microarray

[1405] The following clones listed in Table 15 were shown previously to be over-expressed in lung tumors by microarray analysis (see, Example 2C and Example 6, Table 11). The results of this microarray analysis are summarized below in Table 15.

TABLE 15

| SEQ ID NO: | CLONE ID # | Ratio | Mean Signal 1 | Mean Signal 2 |
|---|---|---|---|---|
| 1383 | 50096 | 16.04 | 1.895 | 0.118 |
| | (contig 156) | | | |
| 1560 | 54454 | 2.86 | 0.2 | 0.07 |
| | (contig 234) | | | |
| 1561 | 54463 | 3.31 | 0.248 | 0.075 |
| | (contig 235) | | | |
| 1707 | 59376 | 3.23 | 0.734 | 0.227 |
| 1733 | 61090 | 2.68 | 0.364 | 0.136 |
| 1735 | 61093 | 5.7 | 0.687 | 0.121 |
| 1758 | 61137 | 8.63 | 1.463 | 0.17 |
| 1761 | 61144 | 7.02 | 0.783 | 0.112 |
| 1766 | 61159 | 4.57 | 0.831 | 0.182 |
| 1771 | 61173 | 5.57 | 1.075 | 0.193 |
| 1775 | 61185 | 5.29 | 0.962 | 0.182 |
| 1786 | 61225 | 3.41 | 0.379 | 0.111 |

[1406] Real-time PCR anaylsis was performed on these sequences on a small cell lung carcinoma panel as described in Example 7. The results obtained from the real-time PCR analysis are summarized in Table 16.

TABLE 16

| SEQ ID | |
|---|---|
| NO: | Real-Time PCR Results |
| 1383 | On the SCLC panel, this gene is overexpressed in 2/2 primary |
| | small cell carcinoma and 6/6 SCLC cell lines. Some expression |
| | is also seen in normal brain, pituitary gland, spinal cord, and |
| | thymus. |
| 1560 | On the SCLC panel, this gene is overexpressed in 2/2 primary |
| | small cell carcinomas and 3/6 SCLC cell lines. Expression is |
| | also seen in normal brain and pituitary gland. |
| 1561 | On the SCLC panel, this gene is overexpressed in 2/2 primary |
| | small cell carcinomas, 6/6 SCLC cell lines, 1/1 atypical |
| | carcinoid metastases, adenocarcinoma, and squamous cell |
| | carcinoma pools. Expression is also seen in normal bone |
| | marrow, lymph node, thymus, and at lower levels in other |
| | normal tissues. |
| 1707 | On the SCLC panel, this gene is overexpressed in 1/6 SCLC cell |
| | lines and 0/2 primary small cell carcinomas. It is also expressed |
| | in normal stomach and at lower levels in normal brain, salivary |
| | gland, and trachea. |
| 1733 | On the SCLC panel, this gene is overexpressed in 2/2 primary |
| | small cell carcinomas, 6/6 SCLC cell lines, 1/1 atypical |
| | carcinoid metastases, adenocarcinoma, and squamous cell |
| | carcinoma pools. Some expression is also seen in normal bone |
| | marrow, lymph node, thyms, and at lower levels in other |
| | normal tissues. |
| 1735 | On the SCLC panel, this gene is overexpressed in 2/2 primary |
| | small cell carcinomas, 5/6 SCLC cell lines, 0/1 atypical |
| | carcinoid metastases, and adenocarcinoma pool. Lower level |
| | expression is also seen in normal bone marrow and skeletal |
| | muscle. |
| 1758 | On the SCLC panel, this gene is overexpressed in 2/2 primary |
| | small cell carcinomas, 6/6 SCLC cell lines, 0/1 atypical |
| | carcinoid metastases, adenocarcinoma, and squamous cell |
| | carcinoma pools. Some expression is also seen in normal bone |
| | marrow, thyroid gland, and trachea. |
| 1761 | On the SCLC panel, this gene is overexpressed in 2/2 primary |
| | small cell carcinomas, 6/6 SCLC cell lines, 0/1 atypical |
| | carcinoid metastases, adenocarcinoma, and squamous cell |
| | carcinoma pools. Expression is also seen in normal bone |
| | marrow. |
| 1766 | On the SCLC panel, this gene is overexpressed in 2/2 primary |
| | small cell carcinomas, 6/6 SCLC cell lines, and 0/1 atypical |
| | carcinoid metastases. Expression is also seen in normal pituitary |
| | gland, adrenal gland, bone marrow, thymus, salivary gland, and |
| | at lower levels in a variety of other normal tissues. |
| 1771 | On the SCLC panel, this gene is overexpressed in 2/2 primary |
| | small cell carcinomas, 6/6 SCLC cell lines, 0/1 atypical |
| | carcinoid metastases, and squamous cell carcinoma pools. Some |
| | expression is also seen in normal pituitary gland. |
| 1775 | On the SCLC panel, this gene is overexpressed in 2/2 primary |
| | small cell carcinomas, adenocarcinoma, and squamous cell |
| | carcinoma pools. No expression is observed in the SCLC cell |
| | lines and the atypical carcinoid metastases. Some normal tissue |
| | expression is seen in liver, stomach, thyroid gland, lymph node, |
| | and thymus. |
| 1776 | On the SCLC panel, this gene is overexpressed in 2/2 primary |
| | small cell carcinomas, 6/6 SCLC cell lines, adenocarcinoma, and |
| | squamous cell carcinoma pools. Some expression is also seen in |
| | normal bone marrow, pituitary gland, stomach, trachea, and |
| | thymus. |

[1407] These sequences were then compared to known sequences in the available databases (Genbank, GeneSeq, huEST, etc.). Nine of these sequences showed some degree of similarity to known sequences in the available databases. The results of these nine hits are summarized in Table 17 along with providing sequence listing identifiers for the DNA sequences and the respective encoded amino acid sequences (where available) of these matches. SEQ ID NO:1561 and 1786 showed no significant similiarity to any known sequences.

TABLE 17

| | | | | Amino |
|---|---|---|---|---|
| SEQ | | | cDNA | Acid Seq. |
| ID | GenBank | | Seq. of | Of Hit (If |
| NO: | Database Hit | GeneSeq. Hit | Hit | Known) |
| 1383 | Pr22 Protein/ | A16376, A08801, | 1891 | 1901 |
| | Stathmin/ | A01633 | | |
| | Oncoprotein 18 | | | |
| 1560 | CDNA | — | 1892 | — |
| | DKFZp564O163 | | | |
| 1561 | Novel | Human secreted protein | — | — |
| | | 5′ EST. (C30107) | | |
| 1707 | SOX21 | Human secreted protein | 1893 | 1902 |
| | (AF107044) | gene 7 cloone HE8CV18. | | |
| | | (X27317) | | |
| 1733 | KIAA0166 gene | Human gene signature | 1894 | 1903 |
| | (D79988) | HUMGS08725. | | |
| | | (T26483) | | |
| 1735 | Ubiquitin-conju- | DNA encoding human | 1895 | 1904 |
| | gating enzyme E2 | ubiquitin-like conju- | | |
| | (AF160215) | gating protein (UBCLE). | | |
| | | (X81676) | | |
| 1758 | Pituitary tumor | Z97293, X89295, | 1896 | 1905 |
| | transforming gene | V36964, V63198, | | |
| | protein 1 | Z97292, C00858, | | |
| | (AF095287) | V88346, Z80287 | | |
| 1761 | Novel | Kidney injury associated | 1897 | 1906 |
| | | molecule HW051 cDNA | | |
| | | clone. (V80605) | | |
| 1766 | Cyclin-dependent | Cyclin-dependent kinase | 1898 | 1907 |
| | kinase inhibitor | (CDK6) inhibiting pro- | | |
| | p18 (CDKN2C) | tein. (T10925; T31456) | | |
| | (AF041248) | | | |
| 1771 | CDK4-inhibitor | Multiple Matches | 1899 | 1908 |
| | (p16-INK4) | | | |
| | (L27211) | | | |
| 1775 | Monokine in- | Monokine induced by | 1900 | 1909 |
| | duced by gamma | gammer-interferon. | | |
| | interferon (MIG) | (X14998; Z26088) | | |
| | (NM_002416) | | | |
| 1776 | Novel | — | — | — |

[1408] Further studies have resulted in isolation of the full-length cDNA sequence for the cloned sequence of clone #61093 (SEQ ID NO:1735, L1437P). In order to determine the transcript size of the gene, a multiple tissue Northern blot was probed with the radioactively labeled original cloned sequence (SEQ ID NO:1735). The Northern blot included about 20 ug of total RNA from small cell lung carcinoma and normal tissues samples. Visual analysis of the exposed film revealed a single transcript of approximately 1.2 kb. The full-length sequence was obtained by screening a small cell lung carcinoma tumor cDNA library with the radioactively labeled probe of the original cloned sequence (SEQ ID NO:1735). Approximately 120,000 clones from the cDNA library were screened and 2 independent clones containing a cDNA insert of 931 bases were isolated. The inserts are similar in size to that estimated by Northern Blot analysis. The full-length cDNA sequence is provided in SEQ ID NO:1910. It was discovered that there was one nucleotide difference between the fill-length cDNA and a previously published sequence. However, this nucleotide change does not result in a change in the deduced amino acid sequence. The deduced amino acid sequence encoded by the full-length cDNA is the same as already provided in SEQ ID NO:1904, and confirms earlier predictions that this cDNA encodes a known protein, ubiquitin-conjugated enzyme E2 (AF160215, SEQ ID NO:1904). SEQ ID NO:1910 (L1437P) was shown to be over-expressed in lung small cell lung carcinoma by microarray, real-time PCR and Northern Blot analysis.

### EXAMPLE 14

### Expression in E. coli of a L548S His Tag Fusion Protein

[1409] PCR was performed on the L548S coding region with the following primers:

[1410] Forward primer PDM-433 5′ gctaaaggtgaccccaagaaaccaaag 3′ (SEQ ID NO:1911) Tm 60° C.

[1411] Reverse primer PDM-438 5′ ctattaactcgagggagacagataaacagtttcttta 3′ (SEQ ID NO:1912) TM 61° C.

[1412] The PCR conditions were as follows:

[1413] 10 μl 10× Pfu buffer

[1414] 1.0 μl 10 mM dNTPs

[1415] 2.0 μl 10 μM each primer

[1416] 83 μl sterile water

[1417] 1.5 μl Pfu DNA polymerase (Stratagene, La Jolla, Calif.)

[1418] 50 ηg DNA

[1419] 96° C. for 2 minutes, 96° C. for 20 seconds, 61° C. for 15 seconds, 72° C. for 1 minute 30 seconds with 40 cycles and then 72° C. for 4 minutes.

[1420] The PCR product was digested with XhoI restriction enzyme, gel purified and then cloned into pPDM His, a modified pET28 vector with a His tag in frame, which had been digested with Eco72I and XhoI restriction enzymes. The correct construct was confirmed by DNA sequence analysis and then transformed into BL21 CodonPlus (Stratagene, La Jolla, Calif.) and BL21 pLys S (Novagen, Madison, Wis.) cells for expression.

[1421] The amino acid sequence of expressed recombinant L548S is shown in SEQ ID NO:1913, and the DNA coding region sequence is shown in SEQ ID NO:1914.

### EXAMPLE 15

### Expression in E. coli of a L551S His Tag Fusion Protein

[1422] PCR was performed on the L551S coding region with the following primers:

[1423] Forward primer PDM-498 5′ gtgacgatggaggagctgcgggagatgg 3′ (SEQ ID NO:1915) Tm 67° C.

[1424] Reverse primer PDM-499 5′ cgcctaactcgagtcactaacagctgggag 3′ (SEQ ID NO:1916) TM 66° C.

[1425] The PCR conditions were as follows:

[1426] 10 μl 10× Pfu buffer

[1427] 1.0 μl 10 mM dNTPs

[1428] 2.0 μl 10 μM each primer

[1429] 83 μl sterile water

[1430] 1.5 μl Pfu DNA polymerase (Stratagene, La Jolla, Calif.)

[1431] 50 ηg DNA

[1432] 96° C. for 2 minutes, 96° C. for 20 seconds, 66° C. for 15 seconds, 72° C. for 2 minutes 20 seconds with 40 cycles and then 72° C. for 4 minutes.

[1433] The PCR product was digested with XhoI restriction enzyme, gel purified and then cloned into pPDM His, a modified pET28 vector with a His tag in frame, which had been digested with Eco72I and XhoI restriction enzymes. The correct construct was confirmed by DNA sequence analysis and then transformed into BLR (DE3) pLys S and BLR (DE3) CodonPlus RP cells for expression.

[1434] The amino acid sequence of expressed recombinant L551 S is shown in SEQ ID NO:1917, and the DNA coding region sequence is shown in SEQ ID NO:1918.

### EXAMPLE 16

### Expression in E. coli of a L552S His Tag Fusion Protein

[1435] PCR was performed on the L552S coding region with the following primers:

[1436] Forward primer PDM-479 5′ cggtgccacgcccatggaccttc 3′ (SEQ ID NO:1919) Tm 64° C.

[1437] Reverse primer PDM-480 5′ ctgagaattcattaaacttgtggttgctcttcacc 3′ (SEQ ID NO:1920) TM 62° C.

[1438] The PCR conditions were as follows:

[1439] 10 μl 10× Pfu buffer

[1440] 10 μl 10 mM dNTPs

[1441] 2.0 μl 10 μM each primer

[1442] 83 μl sterile water

[1443] 1.5 μl Pfu DNA polymerase (Stratagene, La Jolla, Calif.)

[1444] 50 ηg DNA

[1445] 96° C. for 2 minutes, 96° C. for 20 seconds, 63° C. for 15 seconds, 72° C. for 1 minute with 40 cycles and then 72° C. for 4 minutes.

[1446] The PCR product was digested with EcoRI restriction enzyme, gel purified and then cloned into pPDM His, a modified pET28 vector with a His tag in frame, which had been digested with Eco72I and EcoRI restriction enzymes. The correct construct was confirmed by DNA sequence analysis and then transformed into BL21 CodonPlus (Stratagene, La Jolla, Calif.) cells for expression.

[1447] The amino acid sequence of expressed recombinant L552S is shown in SEQ ID NO:1921, and the DNA coding region sequence is shown in SEQ ID NO:1922.

### EXAMPLE 17

### Cloning of cDNA Encoding Full-Length Clones #19069 and Clone #18965 or #19002

[1448] Partial sequences of two lung antigens, clones #19069 (SEQ ID NO:90) and #18965 or #19002 (both SEQ ID NO:15), were previously provided. These partial sequences were used as a query to predict the full-length cDNA sequences for the isolated cloned sequenced by searching the publicly available databases. The predicted full-length cDNA sequence for the isolated cloned sequence of SEQ ID NO:90 is provided in SEQ ID NO:1923. The predicted full-length cDNA sequence for the isolated cloned sequence of SEQ ID NO:15 is provided in SEQ ID NO:1924. The deduced amino acid sequences of the two antigens are provided in SEQ ID NO:1925 and 1926, respectively These sequences were then compared to known sequences in the GeneSeq database. Both sequences showed some degree of similarity to known sequences in the GeneSeq database. SEQ ID NO:1923 shows similarity to a lipophosphatic acid acyltransferase (GeneSeq Z25000 and Z65038) and SEQ ID NO:1924 shows similarity to a zinc/iron regulated transporter-like protein (Geneseq Z38333 and A14995).

### EXAMPLE 18

### Epitope-Mapping of L552S-Specific Antibodies

[1449] This example describes the identification of specific epitopes recognized by L552S-specific antibodies. These experiments further confirm the immunogenicity of the L552S protein and support its use as a target for vaccine and/or other immunotherapeutic approaches.

[1450] Peptides of candidate antigens can be used for the evaluation of antibody responses in both preclinical and clinical studies. These data allow one to further confirm the antibody response against a certain candidate antigen. Protein-based ELISA with and without competitive peptides and peptide-based ELISA can be used to evaluate these antibody responses. Peptide ELISA is especially useful since it can further exclude the false positive of the antibody titer observed in protein-based ELISA as well as to provide the simplest assay system to test antibody responses to candidate antigens. In this example, data was obtained using L552S-peptides that show that individual cancer patients produce L552S-specific antibodies recognizing primarily the following three epitopes of L552S:

(SEQ ID NO:1927)

| | | |
|---|---|---|
| (1) | aa21-35: | GPRSGGAQAKLGCCW |

(SED ID NO:1928)

| | | |
|---|---|---|
| (2) | aa116-135: | KVICKSCISQTPGINLDLGS |

(SED ID NO:1929)

| | | |
|---|---|---|
| (3) | aa141-160: | IIPKEEHCKMPEAGEEQPQV |

[1451] In further studies, it was found that affinity-purified antibodies generated by SEQ ID NO:1929 can recognize the L552S protein, and occupy about 0.6% of the total immunoglobulin kappa of a patient's lung plural effusion (LPE) fluid. It was also found that SEQ ID NO:1929 is the dominant epitope of the rabbit polyclonal antibodies specific for L552S protein.

[1452] The experiments described above further confirm the immunogenicity of the L552S lung tumor antigen and support its use as a target for vaccine and other immunotherapeutic approaches. Further, the above experiments identify specific epitopes of the L552S protein that may be of particular importance in the deveolpment of such approaches.

### EXAMPLE 19

### L985P Expression

[1453] For recombinant expression in mammalian cells, the full length L985P cDNA was subcloned into the mammalian expression vector pCEP4 (Invitrogen) with and without a FLAG epitope tag. Both constructs were transfected into HEK293 cells (ATCC) using Lipofectamine 2000 reagent (Invitrogen). Western blot analysis was then performed on these transfected cells to determine if recombinant L985P was being transiently expressed.

[1454] Briefly the transfection was carried out as follows. HEK cells were plated at a density of 350,000 cells/well (6 well plate) in DMEM (Gibco) containing 10% FBS (Hyclone) and grown overnight. The following day, 2 μl of Lipofectamine 2000 (Invitrogen) was added to 50 μl of Optimem 1 (Invitrogen) containing no FBS and incubated for 5 minutes at room temperature. In a different set of tubes 50 μl of Optimem 1 was mixed with 0.8 μg of L985P (with and without FLAG)/plasmid DNA and the mixture was transferred to the Lipofectamine 2000/Optimem mix. The combined mixture was incubated for 20 minutes at room temperature and transferred to the HEK293 cells containing 0.5 ml of DMEM 10% FBS. The Lipofectamine 2000/DNA mix was then added to the HEK293 cells and incubated for 16-24 hrs at 37° C. with 7% CO₂. Cells were rinsed with PBS then collected and pelleted by centrifugation.

[1455] For Western blot analysis, whole cell lysates were generated by incubating the cells in Triton-X100 containing lysis buffer for 30 minutes on ice. Lysates were then cleared by centrifugation at 15,000 rpm for 5 minutes at 4° C. Samples were diluted with SDS-PAGE loading buffer containing beta-mercaptoethanol, then boiled for 10 minutes prior to loading on the SDS-PAGE gel. The protein was transferred to nitrocellulose and probed using a purified anti-L985P rabbit polyclonal sera at a dilution of 1:1000. The blot was revealed with a donkey anti-rabbit Ig coupled to HRP (Jackson ImmunoResearch) followed by incubation in ECL substrate. Results of the blot indicate that recombinant L985P (with and without the FLAG) was expressed in the HEK293 cells.

### EXAMPLE 20

### Generation of Polyclonal Antibodies to Lung Tumor Antigens

[1456] This example describes the generation of polyclonal antibodies specific for the lung tumor antigens, L548S, L552S, and L985P. These data show that these lung tumor antigens are immunogenic and support their use to generate B cell immune responses in vivo. Further, the antibodies generated herein can be used in diagnostic and passive immunotherapeutic applications.

[1457] Three lung antigens, L548S (SEQ ID NO:789), L552S (SEQ ID NO:809) and L985P peptide #3482 (SEQ ID NO:1930), were expressed and purified for use in antibody generation.

[1458] L548S and L552S were expressed in an E. coli recombinant expression system and grown overnight in LB Broth with the appropriate antibiotics at 37° C. in a shaking incubator. The next morning, 10 ml of the overnight culture was added to 500 ml of 2×YT with the appropriate antibiotics in a 2L-baffled Erlenmeyer flask. When the optical density of the culture reached 0.4-0.6 at 560 nanometers, the cells were induced with IPTG (1 mM). Four hours after induction with IPTG, the cells were harvested by centrifugation.

[1459] The cells were then washed with phosphate buffered saline and centrifuged again. The supernatant was discarded and the cells were either frozen for future use or immediately processed. Twenty milliliters of lysis buffer was added to the cell pellets and vortexed. To break open the E. coli cells, this mixture was then run through a french press at a pressure of 16,000 psi. The cells were then centrifuged again and the supernatant and pellet were checked by SDS-PAGE for the partitioning of the recombinant protein.

[1460] For proteins that localized to the cell pellet, the pellet was resuspended in 10 mM Tris pH 8.0, 1% CHAPS and the inclusion body pellet was washed and centrifuged again. This procedure was repeated twice more. The washed inclusion body pellet was solubilized with either 8M urea or 6M guanidine HCl containing 10 mM Tris pH 8.0 plus 10 mM imidazole. The solubilized protein was added to 5 ml of nickel-chelate resin (Qiagen) and incubated for 45 minutes to 1 hour at room temperature with continuous agitation.

[1461] After incubation, the resin and protein mixture was poured through a disposable column and the flow through was collected. The column was then washed with 10-20 column volumes of the solubilization buffer. The antigen was then eluted from the column using 8M urea, 10 mM Tris pH 8.0 and 300 mM imidazole and collected in 3 ml fractions. A SDS-PAGE gel was run to determine which fractions to pool for further purification.

[1462] As a final purification step, a strong anion exchange resin, in this case Hi-Prep Q (Biorad), was equilibrated with the appropriate buffer and the pooled fractions from above were loaded onto the column. Each antigen was eluted off the column with an increasing salt gradient. Fractions were collected as the column was run and another SDS-PAGE gel was run to determine which fractions from the column to pool.

[1463] The pooled fractions were dialyzed against 10 mM Tris pH 8.0. The release criteria were purity as determined by SDS-PAGE or HPLC, concentration as determined by Lowry assay or Amino Acid Analysis, identity as determined by amino terminal protein sequence, and endotoxin level was determined by the Limulus (LAL) assay. The proteins were then put in vials after filtration through a 0.22-micron filter and the antigens were frozen until needed for immunization.

[1464] The L985P peptide #3482 was synthesized and conjugated to KLH and frozen until needed for immunization.

[1465] The polyclonal antisera were generated using 400 micrograms of each lung antigen combined with 100 micrograms of muramyldipeptide (MDP). An equal volume of Incomplete Freund's Adjuvant (IFA) was added and then mixed and injected subcutaneously (S.C.) into a rabbit. After four weeks, the rabbit was S.C. boosted with 200 micrograms of antigen mixed with an equal volume of IFA. Thereafter the rabbit was I.V. boosted with 100 micrograms of antigen. The animal was bled seven days following each boost. The blood was then incubated at 4° C. for 12-24 hours followed by centrifugation to generate the sera.

[1466] The polyclonal antisera were characterized using 96 well plates coated with antigen and incubating with 50 microliters (typically 1 microgram/microliter) of the polyclonal antisera at 4° C. for 20 hours. 250 microliters of BSA blocking buffer was added to the wells and incubated at room temperature for 2 hours. Plates were washed 6 times with PBS/0.1% Tween. The rabbit sera were diluted in PBS/0.1% Tween/0.1%BSA. 50 microliters of diluted sera was added to each well and incubated at room temperature for 30 minutes. The plates were washed as described above, and then 50 microliters of goat anti-rabbit horseradish peroxidase (HRP) at a 1:10000 dilution was added and incubated at room temperature for 30 minutes.

[1467] The plates were washed as described above, and 100 microliters of TMB Microwell Peroxidase Substrate was added to each well. Following a 15-minute incubation in the dark at room temperature, the colorimetric reaction was stopped with 100 microliters of 1N H₂SO₄ and read immediately at 450 nm. All the polyclonal antibodies showed immunoreactivity to the appropriate antigen.

[1468] Tables 18-20 show the antibody reactivity of rabbit antisera in serial dilution to the three lung antigens, L548S, L552S and L985P peptide #3482. The first column shows the antibody dilutions. The columns “Pre-immune sera” indicate ELISA data for two experiments using pre-immune sera. These results are averaged in the fourth column. The columns “anti-L548S, L552S or #3482” indicate ELISA data for two experiments using sera from rabbits immunized as described above, using the respective antigen, referred to as either L548S, L552S or #3482 in the tables.

TABLE 18

| | Pre- | Pre- | | Anti- | Anti- | |
|---|---|---|---|---|---|---|
| Antibody | immune | immune | | L548S | L548S | |
| dilution | sera (1) | sera (2) | Average | (1) | (2) | Average |
| 1:1000 | 0.17 | 0.10 | 0.14 | 0.51 | 0.51 | 0.51 |
| 1:2000 | 0.12 | 0.09 | 0.11 | 0.30 | 0.30 | 0.30 |
| 1:4000 | 0.09 | 0.08 | 0.08 | 0.17 | 0.20 | 0.19 |
| 1:8000 | 0.09 | 0.07 | 0.08 | 0.12 | 0.13 | 0.12 |
| 1:16000 | 0.09 | 0.08 | 0.08 | 0.09 | 0.12 | 0.11 |
| 1:32000 | 0.09 | 0.08 | 0.09 | 0.08 | 0.09 | 0.09 |
| 1:64000 | 0.11 | 0.09 | 0.10 | 0.11 | 0.12 | 0.12 |
| 1:128000 | 0.10 | 0.08 | 0.09 | 0.08 | 0.09 | 0.08 |
| 1:256000 | 0.09 | 0.08 | 0.08 | 0.11 | 0.09 | 0.10 |
| 1:512000 | 0.11 | 0.09 | 0.10 | 0.08 | 0.08 | 0.08 |
| 1:1024000 | 0.10 | 0.08 | 0.09 | 0.08 | 0.10 | 0.09 |
| 1:2048000 | 0.10 | 0.09 | 0.09 | 0.08 | 0.09 | 0.09 |

[1469] TABLE 19

| | Pre- | Pre- | | Anti- | Anti- | |
|---|---|---|---|---|---|---|
| Antibody | immune | immune | | L552S | L552S | |
| dilution | sera (1) | sera (2) | Average | (1) | (2) | Average |
| 1:1000 | 0.08 | 0.19 | 0.13 | 2.14 | 2.03 | 2.08 |
| 1:2000 | 0.08 | 0.06 | 0.07 | 1.93 | 1.97 | 1.95 |
| 1:4000 | 0.07 | 0.06 | 0.06 | 1.81 | 1.82 | 1.82 |
| 1:8000 | 0.08 | 0.06 | 0.07 | 1.63 | 1.64 | 1.64 |
| 1:16000 | 0.06 | 0.05 | 0.05 | 1.47 | 1.29 | 1.38 |
| 1:32000 | 0.06 | 0.05 | 0.06 | 1.03 | 1.10 | 1.06 |
| 1:64000 | 0.06 | 0.06 | 0.06 | 0.73 | 0.69 | 0.71 |
| 1:128000 | 0.06 | 0.05 | 0.06 | 0.44 | 0.48 | 0.46 |
| 1:256000 | 0.06 | 0.06 | 0.06 | 0.26 | 0.25 | 0.26 |
| 1:512000 | 0.07 | 0.06 | 0.06 | 0.16 | 0.15 | 0.16 |
| 1:1024000 | 0.06 | 0.07 | 0.06 | 0.12 | 0.10 | 0.11 |
| 0.00 | 0.06 | 0.06 | 0.06 | 0.06 | 0.06 | 0.06 |

[1470] TABLE 20

| | Pre- | Pre- | | Anti- | Anti- | |
|---|---|---|---|---|---|---|
| Antibody | immune | immune | | #3482 | #3482 | |
| dilution | sera (1) | sera (2) | Average | (1) | (2) | Average |
| 1:1000 | 0.10 | 0.07 | 0.09 | 2.10 | 2.07 | 2.08 |
| 1:2000 | 0.07 | 0.07 | 0.07 | 1.80 | 1.84 | 1.82 |
| 1:4000 | 0.07 | 0.06 | 0.06 | 1.78 | 1.80 | 1.79 |
| 1:8000 | 0.06 | 0.06 | 0.06 | 1.94 | 1.72 | 1.83 |
| 1:16000 | 0.06 | 0.06 | 0.06 | 1.75 | 1.74 | 1.74 |
| 1:32000 | 0.06 | 0.06 | 0.06 | 1.42 | 1.47 | 1.44 |
| 1:64000 | 0.06 | 0.06 | 0.06 | 1.12 | 1.17 | 1.14 |
| 1:128000 | 0.06 | 0.06 | 0.06 | 0.79 | 0.87 | 0.83 |
| 1:256000 | 0.06 | 0.06 | 0.06 | 0.70 | 0.65 | 0.68 |
| 1:512000 | 0.06 | 0.06 | 0.06 | 0.41 | 0.41 | 0.41 |
| 1:1024000 | 0.06 | 0.06 | 0.06 | 0.25 | 0.25 | 0.25 |
| 0 | 0.06 | 0.06 | 0.06 | 0.06 | 0.06 | 0.06 |

[1471] Table 21 shows the Protein A purification of the antibodies to the lung antigen, L548S.

TABLE 21

| Purified | | | |
|---|---|---|---|
| Antibody | | | |
| Concentration | Pro A | Pro A | |
| (μg/ml) | pure | pure | Average |
| 3.0 | 2.20 | 2.12 | 2.16 |
| 1.5 | 2.09 | 2.01 | 2.05 |
| 0.75 | 1.95 | 1.93 | 1.94 |
| 0.38 | 1.83 | 1.85 | 1.84 |
| 0.188 | 1.68 | 1.68 | 1.68 |
| 0.094 | 1.36 | 1.38 | 1.37 |
| 0.047 | 1.02 | 1.06 | 1.04 |
| 0.0234 | 0.68 | 0.73 | 0.71 |
| 0.0177 | 0.40 | 0.42 | 0.41 |
| 0.0059 | 0.24 | 0.25 | 0.24 |
| 0.0029 | 0.17 | 0.15 | 0.16 |
| 0.00 | 0.06 | 0.06 | 0.06 |

[1472] Table 22 shows the affinity purification of the antibodies to the lung antigen, L552S.

TABLE 22

| | Affinity | Affinity | | | Affinity | Affinity | |
|---|---|---|---|---|---|---|---|
| | pure | pure | | | pure | pure | |
| Antibody | (salt | (salt | | Antibody | (acid | (acid | |
| dilution | peak) | peak) | Average | dilution | peak) | peak) | Average |
| 1:50 | 0.19 | 0.18 | 0.18 | 1:1000 | 2.22 | 2.20 | 2.21 |
| 1:100 | 0.10 | 0.09 | 0.10 | 1:2000 | 2.17 | 2.10 | 2.13 |
| 1:200 | 0.06 | 0.06 | 0.06 | 1:4000 | 2.05 | 2.06 | 2.06 |
| 1:400 | 0.06 | 0.06 | 0.06 | 1:8000 | 1.95 | 1.94 | 1.95 |
| 1:800 | 0.06 | 0.05 | 0.06 | 1:16000 | 1.86 | 1.82 | 1.84 |
| 1:1600 | 0.06 | 0.06 | 0.06 | 1:32000 | 1.64 | 1.57 | 1.61 |
| 1:3200 | 0.06 | 0.06 | 0.06 | 1:64000 | 1.28 | 1.26 | 127 |
| 1:6400 | 0.06 | 0.06 | 0.06 | 1:128000 | 0.88 | 0.87 | 0.88 |
| 1:12800 | 0.06 | 0.06 | 0.06 | 1:256000 | 0.56 | 0.56 | 0.56 |
| 1:25600 | 0.06 | 0.06 | 0.06 | 1:512000 | 0.35 | 0.34 | 0.34 |
| 1:51200 | 0.06 | 0.06 | 0.06 | 1:1024000 | 0.18 | 0.17 | 0.18 |
| 0.00 | 0.06 | 0.06 | 0.06 | 0.00 | 0.06 | 0.06 | 0.06 |

[1473] Tables 23A and 23B show the affinity purification and the Protein A purification of the antibodies to the lung antigen L985P peptide #3482.

TABLE 23A

| Purified | | | |
|---|---|---|---|
| Antibody | | | |
| Concentration | Affinity | Affinity | |
| (μg/ml) | pure | pure | Average |
| 3.0 | 1.73 | 1.69 | 1.71 |
| 1.50 | 1.32 | 1.28 | 1.30 |
| 0.75 | 0.96 | 0.91 | 0.93 |
| 0.38 | 0.63 | 0.61 | 0.62 |
| 0.19 | 0.38 | 0.39 | 0.38 |
| 0.09 | 0.19 | 0.20 | 0.19 |
| 0.05 | 0.16 | 0.10 | 0.13 |
| 0.02 | 0.12 | 0.15 | 0.13 |

[1474] TABLE 23B

| Purified | | | |
|---|---|---|---|
| Antibody | | | |
| Concentration | Pro A | Pro A | |
| (μg/ml) | pure | pure | Average |
| 40.70 | 1.80 | 1.91 | 1.85 |
| 20.35 | 1.54 | 1.53 | 1.53 |
| 10.18 | 1.04 | 1.18 | 1.11 |
| 5.09 | 0.71 | 0.78 | 0.74 |
| 2.54 | 0.43 | 0.52 | 0.48 |
| 1.27 | 0.25 | 0.28 | 0.26 |
| 0.64 | 0.13 | 0.20 | 0.17 |
| 0.32 | 0.10 | | 0.10 |

[1475] The data described in the above example show that the lung tumor antigens, L548S, L552S, and L985P are immunogenic and can be used to generate B cell immune responses in vivo. Further, the antibodies generated herein have utility in diagnostic and passive immunotherapeutic applications.

### EXAMPLE 21

### Cloning of Extended cDNA Sequence of L1439P

[1476] The partial cDNA sequence for clone #61144 (SEQ ID NO:1761, referred to as clone L1439P) was identified from a small cell lung carcinoma PCR based subtraction library on lung chip 5. As previously disclosed in Example 4, microarray analysis was performed on this subset of the lung tumor sequences in order to further evaluate their expression profiles in various tumor and normal tissues, the results of which are provided in Table 11. Clone L1439P was shown to have a greater than 2-fold over-expression in the tumor probe group versus normal tissues and an average expression in normal tissues of less than 0.2. Additional studies showed this same clone to be over-expressed in a subset of small cell lung carcinomas (see, Table 16).

[1477] Further studies have resulted in the isolation of the full-length cDNA for the cloned sequence of L1439P. In order to determine the transcript size of the gene, a multiple tissue Northern blot was probed with the radioactively labeled original cloned sequence (SEQ ID NO:1180). The Northern blot included about 10 ug of total RNA from small cell lung carcinoma and normal tissues samples. Visual analysis of the exposed film revealed a single transcript of approximately 2.4 kb. The extended sequence of the clone was obtained by screening a small cell lung carcinoma tumor cDNA library with a radioactively labeled probe of the original cloned sequence (SEQ ID NO:1761). Approximately 120,000 clones from the cDNA library were screened and one independent clone containing a cDNA insert of 1.5 kb was isolated. This extended cDNA sequence is provided in SEQ ID NO:1931, and the deduced amino acid sequence encoded by this extended cDNA sequence is provided in SEQ ID NO:1932. This extended cDNA sequence was analyzed against the Genbank database and was found to show similarity to the NUF2R gene (AF326731). The full-length cDNA sequence of NUF2R is provided in SEQ ID NO:1933, and the deduced amino acid sequence encoded by NUF2R is provided in SEQ ID NO:1934.

### EXAMPLE 22

### Expression in Megaterium of a Histidine Tag-Free L552S Fusion Protein

[1478] PCR was performed on the L552S coding region with the following primers:

[1479] Forward primer PDM-737 5′ ctatgttggcatgcggtgccacgccc 3′ (SEQ ID NO:1935) Tm 66° C.

[1480] Reverse primer PDM-738 5′ cacgcctaagatcttcattaaacttgtggttg 3′ (SEQ ID NO:1936) TM 60° C.

[1481] The PCR conditions were as follows:

[1482] 10 μl 10×Pfu buffer

[1483] 1.0 μl 10 mM dNTPs

[1484] 2.0 μl 10 μM each primer

[1485] 83 μl sterile water

[1486] 1.5 μl Pfu DNA polymerase (Stratagene, La Jolla, Calif.)

[1487] 50 ηg DNA

[1488] 96° C. for 2 minutes, 96° C. for 20 seconds, 63° C. for 15 seconds, 72° C. for 1 minute with 40 cycles and then 72° C. for 4 minutes.

[1489] The PCR product was digested with SphI and BglII restriction enzymes, gel purified and then cloned into pMEG-3, which had been digested with SphI and BglII restriction enzymes. The correct construct was confirmed by DNA sequence analysis and then transformed into Megaterium cells for expression.

[1490] The amino acid sequence of expressed recombinant L552S is shown in SEQ ID NO:1937, and the DNA coding region sequence is shown in SEQ ID NO:1938.

### EXAMPLE 23

### Expression in E. coli of a Histidine TAG-Free L552S Fusion Protein

[1491] PCR was performed on the L552S coding region with the following primers:

[1492] Forward primer PDM-736 5′ ctatgttgcatatatgcggtgccacgcc 3′ (SEQ ID NO:1939) Tm 64° C.

[1493] Reverse primer PDM-480 5′ ctgagaattcattaaacttgtggttgctcttcacc 3′ (SEQ ID NO:1920) TM 62° C.

[1494] The PCR conditions were as follows:

[1495] 10 μl 10× Pfu buffer

[1496] 1.0 μl 10 mM dNTPs

[1497] 2.0 μl 10 μM each primer

[1498] 83 μl sterile water

[1499] 1.5 μl Pfu DNA polymerase (Stratagene, La Jolla, Calif.)

[1500] 50 ηg DNA

[1501] 96° C. for 2 minutes, 96° C. for 20 seconds, 63° C. for 15 seconds, 72° C. for 1 minute with 40 cycles and then 72° C. for 4 minutes.

[1502] The PCR product was digested with NdeI and EcoRI restriction enzymes, gel purified and then cloned into pPDM, a modified pET28 vector, which had been digested with NdeI and EcoRI restriction enzymes. The correct construct was confirmed by DNA sequence analysis and then transformed into BLR pLys S and HMS 174 pLysS cells for expression.

[1503] The amino acid sequence of expressed recombinant L552S is shown in SEQ ID NO:1940, and the DNA coding region sequence is shown in SEQ ID NO:1941.

### EXAMPLE 24

### Generation of L552S-Specific CTL Lines using in Vitro Whole-Gene Priming

[1504] This example describes the generation of L552S-specific cytotoxic T cell (CTL) lines. These experiments support the fact that the L552S protein is immunogenic and support its use as a target for vaccines and immunotherapeutics.

[1505] Using in vitro whole-gene priming with tumor antigen-vaccinia infected DC (Yee et al, The Journal of Immunology, 157(9):4079-86, 1996), human CTL lines were derived that specifically recognize autologous fibroblasts transduced with the L552S tumor antigen, as determined by interferon-gamma ELISPOT analysis. Specifically, dendritic cells (DC) were differentiated from Percoll-purified monocytes derived from PBMC of normal human donors by growing for five days in RPMI medium containing 10% human serum, 50 ng/ml human GM-CSF and 30 ng/ml human IL-4. Following culture, DC were infected overnight with a recombinant adenovirus that expresses L552S at a multiplicity of infection (M.O.I) of five, and matured overnight by the addition of 2 μg/ml CD40 ligand. Virus was then inactivated by UV irradiation. CD8+cells were enriched for by the depletion of CD4+ and CD14+ cells. CD8+ T cells were isolated using a magnetic bead system, and priming cultures were initiated in individual wells of six 96-well plates with the cytokines IL-6 and IL-12. Cultures were restimulated every 7-10 days using autologous primary fibroblasts retrovirally transduced with L552S, and the costimulatory molecule CD80 in the presence of IL-2. Following three stimulation cycles, two CD8+ T cell lines, 2-12G and 4-7A, were identified using interferon-gamma ELISPOT analysis that specifically produce interferon-gamma when stimulated with the L552S tumor antigen-transduced autologous fibroblasts, but not with a control antigen. Both lines were restimulated and tested again in an antibody blocking assay to determine restriction to specific HLAs. Line 2-12G appears to be HLA-B/C restricted, while Line 4-7A appears to be HLA-A restricted. Line 2-12G was cloned using anti-CD3 and feeder cells, with fourteen specific clones being recovered. These clones have the same pattern of reactivity in antibody blocking assays as the parental L2-12G CTL line. In addition, using a panel of HLA-mismatched B-LCL lines transduced with a vector expressing L552S, and measuring interferon-gamma production by the CTL lines in an ELISPOT assay, these CTLs appear to be restricted by HLA-B*4402.

### EXAMPLE 25

### Epitope-Mapping of L552S- and XAGE-1-Specific Antibodies

[1506] This example describes the identification of specific epitopes recognized by L552S-specific antibodies present in sera of lung cancer patients. These experiments further confirm the immunogenicity of the L552S protein and support its use as a target for vaccine and/or other immunotherapeutic approaches.

[1507] It was previously found that L552S is an alternative splicing isoform of XAGE-1. In this example, data was obtained using 20 mer peptides specific for either L552S or XAGE-1 to screen the sera of lung cancer patients for antibodies specific for L552S and XAGE-1, respectively. It was found that individual cancer patients produce both antibodies specific for L552S as well as for XAGE-1. It was determined that these specific antibodies recognize primarily the following additional epitope of L552S and two epitopes of XAGE-1:

L552S-specific:

| | | |
|---|---|---|
| aa31-50: | LGCCWGYPSPRSTWNDRPF | (SEQ ID NO:1942) |

XAGE-1-specific:

| | | |
|---|---|---|
| aa11-30: | CSLGVFPSAPSPVWGTRRSC | (SED ID NO:1943) |
| aa41-50: | ILSPLLRHGGHTQTQNHTAS. | (SED ID NO:1944) |

[1508] The experiments described above further confirm the immunogenicity of the L552S lung tumor antigen and support its use as a target for vaccine and other immunotherapeutic approaches. Further, the above experiments identify specific epitopes of the L552S protein that may be of particular importance in the deveolpment of such approaches.

### EXAMPLE 26

### Immunohistochemistry Analysis of L552S

[1509] In order to determine L552S protein expression in various normal and lung cancer tissues, immunohistochemistry (IHC) analysis was performed using an affinity purified L552S polyclonal antibody. Specifically, tissue samples were fixed in a formalin solution for 12-24 hrs and embedded in paraffin before being sliced into 8 micron sections. Steam heat induced epitope retrieval (SHIER) in 0.1 M sodium citrate buffer (pH 6.0) was used for optimal staining conditions. Sections were incubated with 10% serum/PBS for 5 minutes. Primary antibody was added to each section for 25 minutes at indicated concentrations followed by a 25 minute incubation with either anti-rabbit or anti-mouse biotinylated antibody. Endogenous peroxidase activity was blocked by three-1.5 minute incubations with hydrogen peroxidase. The avidin biotin complex/horse radish peroxidase (ABC/HRP) system was used along with DAB chromogen to visualize L552S expression. Slides were counterstained with hematoxylin to visualize cell nuclei.

[1510] IHC analysis of L552S is disclosed in Table 24:

TABLE 24

| | Staining | |
|---|---|---|
| Tissue Type | (pos/total) | Comments |
| Adeno Lung Cancer | 10/12 | Strong staining (nuclear “dot-like”) |
| Squamous Lung | 4/12 | Light staining (cytoplasmic |
| Cancer | | “dot-like”) |
| Adrenal | 0/1 | |
| Artery-endothelium | 0/1 | Light cytoplasmic staining |
| Blood (bone marrow) | 0/1 | |
| Brain (cerebellum) | 0/1 | |
| Brain (cortex) | 0/1 | |
| Breast | 0/1 | |
| Bronchus | 0/5 | |
| Colon | 1/4 | Very light staining (cytoplasmic |
| | | “dot-like”) |
| Esophagus | 0/1 | |
| Fallopian Tube | 0/1 | |
| Gall Bladder | 0/1 | |
| Heart | 0/1 | |
| Kidney | 2/4 | Very light staining (cytoplasmic |
| | | “dot-like”) |
| Liver | 1/4 | Very light staining (cytoplasmic |
| | | “dot-like”) |
| Lung | 0/13 | |
| Pancreas | 0/1 | |
| Pituitary | 1/1 | Very light staining (cytoplasmic |
| | | “dot-like”) |
| Placenta | 1/1 | Very light staining (cytoplasmic |
| | | “dot-like”) |
| Prostate | 0/1 | |
| Skeletal Muscle | 0/1 | |
| Skin | 0/1 | |
| Small Bowel | 0/1 | |
| Spinal Cord | 0/1 | |
| Spleen | 0/1 | |
| Stomach | 0/1 | |
| Testis | 1/2 | Very few selected cells positive |
| Thymus | 0/1 | |
| Thyroid | 0/1 | |
| Trachea | 0/1 | |
| Urinary Bladder | 0/1 | |
| Ureter | 0/1 | |
| Uterus | 0/1 | |

### EXAMPLE 27

### Identification of CD4 Immunogenic T Cell Epitopes Derived from L552S

[1511] This example describes the identification of specific epitopes recognized by L552S antigen-specific T cells. These experiments further confirm the immunogenicity of the L552S protein and support its use as a target for vaccine and/or other immunotherapeutic approaches.

[1512] CD4 T cell lines specific for the antigen L552S (SEQ ID NO:809) were generated as follows. A total of thirty 20-mer peptides overlapping by 15 amino acids corresponding to the amino acid residues of full-length L552S (SEQ ID NO:809) were synthesized. The amino acid sequence of each of the thirty 20-mer peptides and the respective DNA sequence which encodes each of these peptides is provided in Table 25. Dendritic cells (DC) were differentiated from Percoll-purified monocytes derived from PBMC of normal male human donors by plastic adherence and growing for five days in RPMI medium containing 10% human serum, 50 ng/ml human GM-CSF and 30 ng/ml human IL-4. Purified CD4 T cells were generated from the same donor as the DCs by using MACs beads and negative selection of PBMCs. The DCs were pulsed overnight with pools of the 20-mer peptides with each peptide at an individual concentration of 0.5 μg/mL. The pulsed DCs were washed and plated at 10,000 cells per well of 96-well round bottom plates, and purified CD4 T cells were added at 100,000 cells per well. Cultures were supplemented with 10 ng/mL IL-6 and 5 ng/mL IL-12 and incubated at 37° C. Cultures were restimulated as above on a weekly basis using DCs made and pulsed as above as the APC, supplemented with 10 U/mL IL-2 and 5 ng/mL 1L-7. Following three in vitro stimulation cycles (the initial priming+two restimulations), lines (each line corresponds to one well) were tested for specific proliferation and cytokine production in response to the stimulating pool versus an irrelevant peptide pool of peptides derived from assorted unrelated antigens. A number of individual CD4 T cell lines (49/576 by IFN-gamma and 63/576 by proliferation) demonstrated significant cytokine release (IFN-gamma) and proliferation in response to the L552S peptide pools, but not to the control peptide pool. Twenty five of the T cell lines which exhibited specific activity were restimulasted on the appropriate pool of L552S peptides and reassayed on autologous DCs pulsed with the individual peptides or recombinant protein made in E. coli. Approximately 13 immunogenic peptides were recognized by the T cells from the entire set of peptide antigens tested. These 13 peptides are (*) in Table 25.

[1513] In some cases the peptide reactivity of the T cell line could be mapped to a single but some could be mapped to more than one peptide in each pool. This result indicates that all 13 peptides may be naturally processed epitopes of the L552S protein.

TABLE 25

L552S CD4 Overlapping Peptides

| | | | |
|---|---|---|---|
| | | | DNA |
| | | Peptide | SEQ ID |
| Peptide | Sequence | SEQ ID NO: | NO: |

| | | | |
|---|---|---|---|
| 1 | MRCHAHGPSCLVTAITREEG | 1945 | 1974 |
| 2 | HGPSCLVTAITREEGGPRSG | 1946 | 1975 |
| 3 | LVTAITREEGGPRSGGAQAK | 1947 | 1976 |
| 4* | TREEGGPRSGGAQAKLGCCW | 1948 | 1977 |
| 5* | GPRSGGAQAKLGCCWGYPSP | 1949 | 1978 |
| 6* | GAQAKLGCCWGYPSPRSTWN | 1950 | 1979 |
| 7* | LGCCWGYPSPRSTWNPDRRF | 1951 | 1980 |
| 8 | GYPSPRSTWNPDRRFWTPQT | 1952 | 1981 |
| 9 | RSTWNPDRRFWTPQTGPGEG | 1953 | 1982 |
| 10 | PDRRFWTPQTGPGEGRHERH | 1954 | 1983 |
| 11 | WTPQTGPGEGRHERHTQTQN | 1955 | 1984 |
| 12 | GPGEGRHERHTQTQNHTASP | 1956 | 1985 |
| 13 | RHERHTQTQNHTASPRSPVM | 1957 | 1986 |
| 14 | TQTQNHTASPRSPVMESPKK | 1958 | 1987 |
| 15* | HTASPRSPVMESPKKKNQQL | 1959 | 1988 |
| 16 | RSPVMESPKKKNQQLKVGIL | 1960 | 1989 |
| 17 | ESPKKKNQQLKVGILHLGSR | 1961 | 1990 |
| 18* | KNQQLKVGILHLGSRQKKIR | 1962 | 1991 |
| 19* | KVGILHLGSRQKKIRIQLRS | 1963 | 1992 |
| 20* | HLGSRQKKIRIQLRSQCATW | 1964 | 1993 |
| 21* | RQKKIRIQLRSQCATWKVICK | 1965 | 1994 |
| 22* | IQLRSQCATWKVICKSCISQ | 1966 | 1995 |
| 23* | SQCATWKVICKSCISQTPGIN | 1967 | 1996 |
| 24* | KVICKSCISQTPGINLDLGS | 1968 | 1997 |
| 25 | SCISQTPGINLDLGSGVKVK | 1969 | 1998 |
| 26 | TPGINLDLGSGVKVKIIPKE | 1970 | 1999 |
| 27* | LDLGSGVKVKIIPKEEHCKM | 1971 | 2000 |
| 28 | GVKVKIIPKEEHCKMPEAGE | 1972 | 2001 |
| 29 | IIPKEEHCKMPEAGEEQPQV | 1973 | 2002 |

[1514] The experiments described above further confirm the immunogenicicty of the L552S lung tumor antigen and support its use as a target for vaccine and other immunotherapeutic approaches. Further, the above experiments identify specific epitopes of L552S protein that may be of particular importance in the deveolpment of such approaches.

### EXAMPLE 28

### HLA Restriction of an L552S-Specific CTL Clone

[1515] This example describes the determination of the HLA restriction of an L552S-specific cytotoxic T cell (CTL) clone and further shows that this clone recognizes L552-positive primary lung tumor cells. These experiments support the fact that the L552S protein is immunogenic and support its use as a target for vaccines and immunotherapeutics.

[1516] One of the CTL lines described in Example 24 was further cloned by limiting dilution, with fourteen specific clones recovered. To determine the HLA restriction of one of the clones, D77 L552 Clone 14, a panel of fibroblasts matched at one or two HLA alleles were transduced with pBIB L552 or infected with adenovirus L552 at an MOI of 50:1. These targets were tested against the D77 L552 CD8 clone in an ELISPOT assay with 10000 fibroblasts, 10000 T cells and 5 U/mL IL-2 per well. The results indicate that this clone is either restricted by B*4402 or Cw*0501.

[1517] To determine whether the CD8+T cell clone is restricted by B*4402 or Cw*0501, COS-7 cells were transfected with a combination of pcDNA3 L552S and pcDNA3 B*4402 or pBIB Cw*0501. These targets were again tested against the same D77 L552 CD8 clone as above in an ELISPOT assay with 10000 COS-7, 10000 clone 14 and 5 U/mL IL-2 per well. The clone recognized the L552 and B*4402 transfected COS-7 cells, indicating that it is restricted by the HLA-B*4402 molecule.

[1518] In further studies, three different tumors, 659-22, 3-90T and HTB 183, that had been previously analyzed by real time RT-PCR for L552 message level were selected and transduced with either B*4402 or Cw*0501 as a control. 659-22 and 3-90T contain L552 message, while HTB 183 was the negative control. After two rounds of selection, the tumors were analyzed by FACs for their B44 expression level. 659-22 were found to endogenously express high levels of B44, but it was not determined which of the B44s, B*4402, B*4404, etc, were being expressed. Approximately 20% of the 3-90T express B44. The HTB 183 express B44 quite well. When the D77 L552 clone 14 described above was tested against these tumors, 659-22 transduced with B*4402 was recognized. Thus, the results further confirm that the D77 L552-specific CD8 clone is restricted by HLA-B*4402 and recognizes L552-positive primary lung tumor cells.

### EXAMPLE 29

### Expression of L552S and XAGE-1

[1519] In this Example, real-time RT-PCR analysis was performed in order to delineate the expression of L552S from XAGE-1 in lung cancers. The real-time RT-PCR analysis was performed using specific primers localized in the 5′ unique region of L552S, the 5′ unique region of XAGE-1 and the 3′ common region. Specific messages for L552S and XAGE-1 were detected in two lung tumor samples but not in the normal lung samples.

[1520] Identical expression profiles were observed between 5′ unique region of L552S and the common 3′ sequences. The message level for XAGE-1 detected in lung tumors using the 5′ unique primers of XAGE-1 was much lower compared with L552S. However, the extreme secondary structure posed by XAGE-1 could hamper the cDNA synthesis of the 5′ sequence unique to XAGE-1. Thus, it appears from the Northern analysis that XAGE-1 may be a more abundant isoform.

### EXAMPLE 30

### EST Expression Profile of L552S and XAGE-1

[1521] To further evaluate the expression profile of L552S and XAGE-1, an electronic express profiling was performed for each antigen. This was done by searching with the same specific primers as disclosed in Example 29 against a public EST database. Results of this profiling confirm that there are two isoforms of the gene. The ratio of expression between L552S and XAGE-1 is about 1:5. In addition, L552S and XAGE-1 seem to be expressed in Hepatoma, CML, germ cell tumor, Ewing's Sarcoma, and Alveolar Rhabdomyosarcoma.

### EXAMPLE 31

### L985P Lung Tumor Antigen Surface Expression

[1522] Small cell lung carcinoma (SCLC) cell lines, NCI-H69, NCI-H128, HTB-171, HTB-173, HTB-175, and DMS 79, were grown in DMEM (Gibco) containing 10% FBS (Hyclone) at 37° C. with 7% CO2. These growing SCLC cell lines were then subjected to FACS analysis to determine whether L985P is expressed on the surface of these SCLC cell lines using an anti L985P peptide polyclonal sera raised against the predicted excellular region of L985P.

[1523] For FACS analysis, cells were collected and washed with ice cold staining buffer (PBS+1%BSA+Azide +10 μg/ml human IgG). The cells were next incubated for one hour on ice either with no primary antibody, with irrelevant rabbit IgG, whole molecule at a final concentration of 20 μg/ml, or with affinity purified rabbit polyclonal sera raised against L985P peptide #3482 (SEQ ID NO:1930) at a final concentration of 20 μg/ml. The sequence of the L985P peptide #3482 (SEQ ID NO:1930) represents the predicted extracellular region of the L985P protein. The cells were washed 2 times with staining buffer and then incubated with a 1:100 dilution of a goat anti-rabbit Ig(H+L)-FITC reagent (Southern Biotechnology) for 30 minutes on ice. Following two washes, the cells were resuspended in staining buffer containing propidium iodide (PI), a vital stain that allows for identification of permeable cells, and analyzed by FACS.

[1524] In addition, Real-time PCR was performed to determined if L985P mRNA was expressed in these SCLC cell lines. The results of the FACS analysis and the Real time PCR of mRNA expression are presented in Table 26:

TABLE 26

| SCLC Cell | mRNA Expression by Real | Surface Expression by |
|---|---|---|
| Line | Time PCR | FACS |
| NCI-H69 | + | + |
| HTB-173 | + | + |
| HTB-175 | − | − |
| HTB-171 | − | − |
| NCI-H128 | − | − |
| DMS 79 | − | − |

### EXAMPLE 32

### IHC Analysis of L985P Lung Tumor Antigen Expression

[1525] In order to determine which tissues express the lung cancer target L985P, immunohistochemistry (IHC) analysis was performed on cell lines and a diverse range of tissue sections. Tissue samples were fixed in formalin solution for 12-24 hours and embedded in paraffin before being sliced into 8 micron sections. Steam heat induced epitope retrieval (SHIER) in 0.1 M sodium citrate buffer (pH 6.0) was used for optimal staining conditions. Sections were incubated with 10% serum/PBS for 5 minutes. Primary antibody was added to each section for 25 minutes followed by 25 minute incubation with anti-rabbit biotinylated antibody. Endogenous peroxidase activity was blocked by three 1.5 minute incubations with hydrogen peroxidase. The avidin biotin complex/horse radish peroxidase (ABC/HRP) system was used along with DAB chromogen to visualize antigen expression. Slides were counterstained with hematoxylin to visualize cell nuclei.

[1526] To test specificity of the staining procedure, various cell lines and transfected cell lines were stained. Wild-type HEK cells did not stain while HEK/L985-flag stable transfectant cells, HEK/L985 stable transfectant cells, and NCI-H69 cells all stained positive. No staining was observed in HTB175 cells.

[1527] A variety of normal tissues were stained as described above. As summarized in Table 27, in addition to expression in lung, staining was observed in liver, kidney, small intestine, testis, endometrium, adrenal gland, adrenal cortex, and thymus.

TABLE 27
L985P IHC Analysis On Normal Tissue Array

| BD Tissue Array | | Imgenex Tissue Array | |
|---|---|---|---|
| Tissue Type | Cell Type Stained | Tissue Type | Cell Type Stained |
| Heart | | Heart | |
| Heart | | Skin, buttock | |
| Lung | tissue droped | Lung | brush border of |
| | | | bronchiole |
| | | | epithelium |
| Lung | | Lung | |
| Liver | liver cells | Liver | liver cells |
| Liver | liver cells | Liver | liver cells |
| Spleen | | Spleen | |
| Spleen | | Spleen | |
| Kidney | renal tubule cells | Kidney cortex | renal tubule cells |
| Kidney | renal tubule cells | Kidney medulla | renal tubule cells |
| Stomach | | Stomach body | |
| Stomach | | Stomach antrum | |
| Small intestine | intestine | Stomach smooth | |
| | epithelium | muscle | |
| Small intestine | intestine | Duodenum | |
| | epithelium | | |
| Colon | | Ileum | |
| Colon | | Appendix | |
| Myometrium | | Colon | |
| Myometrium | | Sigmoid colon | |
| Ovary | | Ovary | |
| Ovary | | Ureter | |
| Prostate | | Urinary bladder | |
| Prostate | | Prostate | |
| Testis | Interstitial Leydig | Seminal vesical | |
| | cells | | |
| Testis | Interstitial Leydig | Testis | Interstitial Leydig |
| | cells | | cells |
| Endometrium | glandula | Epidydimis | |
| | epithelium | | |
| Endometrium | glandula | Endometrium, | glandula |
| | epithelium | proliferative | epithelium |
| Tonsil | | Endometrium, | glandula |
| | | secretory | epithelium |
| Tonsil | | Myometrium | |
| Thyroid | | Uterine | |
| | | cervix | |
| | | (endocervix) | |
| Thyroid | | Uterine | |
| | | cervix | |
| | | (exocervix) | |
| Adrenal gland | glandula cell | Salpinx | |
| Adrenal gland | glandula cell | Placenta, villi | |
| Artery | | Plancenta, | |
| | | aminochorion | |
| Artery | | Placenta cord | |
| Vein | | Adrenal cortex | glandula cells |
| Vein | | Adrenal cortex | glandula cells |
| Cerebrum | | Thyroid | |
| Cerebrum | | Thymus | medulla epithelia |
| | | | cells |
| Cerebellum | | Brain, white | |
| | | matter | |
| Cerebellum | | Brain, gray matter | |
| Smooth muscle | | Cerebellum | |
| Smooth muscle | | Spinal cord | |
| Pancreas | | | |
| Pancreas | | | |
| Skeletal muscle | | | |
| Skeletal muscle | | | |
| Cervix | | | |
| Cervix | | | |

### EXAMPLE 33

### Further Characterization of L985P Expression

[1528] The full length L985P cDNA with a glycine substitution at position 119 was PCR amplified from the small cell lung cancer (SCLC) cell lines NCI-H69 and HTB-173. The sequence for L985P Gly 119 (full-length cDNA: SEQ ID NO:2003; full-length protein: SEQ ID NO:2004) is the same as that of the previously disclosed sequence for CSIMM-2 available from the Geneseq database (cDNA: SEQ ID NO:1676; protein: SEQ ID NO:1677) and differs from the previously disclosed sequence for L985P (partial cDNA: SEQ ID NO:1467; full-length cDNA: 1873; full-length protein: SEQ ID NO:1874), which codes for a Glutamic acid at amino acid 119. Recombinant L985P protein containing a Gly at amino acid 119 was detected in transfected mammalian cell lysates using a rabbit polyclonal sera raised against a L985P peptide. Additionally, L985P Gly 119 was detected on the cell surface by flowcytometry using this rabbit polyclonal antibody. However, the previously disclosed L985P peptide sequence that contains a Glu at amino acid 119, does not efficiently localize to the plasma membrane. Therefore, as a surface target for monoclonal antibodies L985P Gly 119 is advantageous because it readily localizes to the plasma membrane. Thus, expression of L985P Gly 119 was further characterized in a mammalian expression system.

[1529] For recombinant expression in mammalian cells, the L985P Gly 119 cDNA (SEQ ID NO:2003) was subcloned into the mammalian expression vector pCEP4 (Invitrogen, Carlsbad, Calif.). The construct was transfected into HEK293 cells (American Type Culture Collection (ATCC), Manassas, Va.) using Lipofectamine 2000 reagent (Invitrogen, Carlsbad, Calif.). Briefly, the HEK cells were plated at a density of 350,000 cells/well (6 well plate) in DMEM (Gibco (Invitrogen Life Technologies, Carlsbad, Calif.) containing 10% FBS (Hyclone, Logan, Utah) and grown overnight. The following day, 2 ul of Lipofectamine 2000 (Invitrogen, Carlsbad, Calif.) was added to 50 ul of Optimem 1 (Invitrogen, Carlsbad, Calif.) containing no FBS and incubated for 5 minutes at RT. In a different tube 50 ul of Optimem 1 was mixed with 0.8 ug of L985P Gly 119 plasmid DNA and the mixture was transferred to the Lipofectamine 2000/Optimem mix. The combined mixture was incubated for 20 minutes at room temperature and transferred to the HEK293 cells containing 0.5 ml of DMEM 10% FBS. The Lipofectamine 2000/DNA mix was then added to the HEK293 cells and incubated for approximately 48 hrs at 37° C. with 7% CO2. Cells were rinsed with PBS then collected and pelleted by centrifugation.

[1530] For Western blot analysis, whole cell lysates were generated by adding 1× NuPAGE sample buffer (Invitrogen, Carlsbad, Calif.) containing 1% beta-mercaptoethanol directly to the cell pellet. The cell pellet was sonicated to homogenization, heated for 5 minutes at 70C, and loaded onto a 12% NuPAGE gel (Invitrogen, Carlsbad, Calif.). Protein was transferred to nitrocellulose and probed using a purified anti-L985P rabbit polyclonal sera (5940L) at a dilution of 1 ug/ml. The blot was visualized with a donkey anti-rabbit Ig coupled to HRP (Jackson ImmunoResearch Laboratories, Westgrove, Pa.) followed by incubation in ECL substrate.

[1531] For flow cytometry analysis, cells were collected and washed with ice cold staining buffer (PBS+1%BSA+Azide). The cells were then incubated for 30 minutes on ice with anti-L985P peptide polyclonal sera (5940L) at a 1 ug/ml concentration. The cells were washed 2 times with staining buffer and then incubated with a 1:100 dilution of a goat anti-rabbit Ig(H+L)-FITC reagent (Southern Biotechnology Associates, Inc., Birmingham, Ala.) for 30 minutes on ice. Following 2 washes, the cells were resuspended in staining buffer containing Propidium Iodide (PI), a vital stain that allows for identification of permeable cells, and analyzed by flow cytometry.

[1532] Using a rabbit polyclonal sera raised against a L985P peptide in a flow cytometric assay, L985P Gly 119 was detected on the cell surface of HEK cells transfected with L985P as described above. These antibodies also detected the presense of L985P in HEK-L985P lysates by Western analysis.

### EXAMPLE 34

### Generation of Mouse Monoclonal Antibodies to L552S Recombinant Protein

[1533] This example describes the generation of mouse monoclonal antibodies specific for the lung tumor antigen, L552S. These data show that L552 is immunogenic and support its use to generate B cell immune responses in vivo. Further, the antibodies generated herein can be used in diagnostic and passive immunotherapeutic applications.

[1534] Production and purification of proteins used for antibody generation: E. coli expressing recombinant L552S protein were grown overnight in LB Broth with the appropriate antibiotics at 37° C. in a shaking incubator. The next morning, 10 ml of the overnight culture was added to 500 ml of 2×YT plus appropriate antibiotics in a 2L-baffled Erlenmeyer flask. When the optical density (at 560 nanometers) of the culture reached 0.4-0.6, the cells were induced with IPTG (1 mM). Four hours after induction with IPTG the cells were harvested by centrifugation. The cells were then washed with phosphate buffered saline and centrifuged again. The supernatant was discarded and the cells were either frozen for future use or immediately processed. Twenty milliliters of lysis buffer was added to the cell pellets and vortexed. To lyse the E. coli cells, this mixture was then run through the French Press at a pressure of 16,000 psi. The cells were then centrifuged again and the supernatant and pellet were checked by SDS-PAGE for the partitioning of the recombinant protein. For proteins that localized to the cell pellet, the pellet was resuspended in 10 mM Tris pH 8.0, 1% CHAPS and the inclusion body pellet was washed and centrifuged again. This procedure was repeated twice more.

[1535] The washed inclusion body pellet was solubilized with either 8 M urea or 6 M guanidine HCl containing 10 mM Tris pH 8.0 plus 10 mM imidazole. The solubilized protein was added to 5 ml of nickel-chelate resin (Qiagen) and incubated for 45 min to 1 hour at room temperature with continuous agitation. After incubation, the resin and protein mixture were poured through a disposable column and the flow through was collected. The column was then washed with 10-20 column volumes of the solubilization buffer. The antigen was then eluted from the column using 8M urea, 10 mM Tris pH 8.0 and 300 mM imidazole and collected in 3 ml fractions. A SDS-PAGE gel was run to determine which fractions to pool for further purification. As a final purification step, a strong anion exchange resin such as Hi-Prep Q (Biorad) was equilibrated with the appropriate buffer and the pooled fractions from above were loaded onto the column. Each antigen was eluted off of the column with an increasing salt gradient. Fractions were collected as the column was run and another SDS-PAGE gel was run to determine which fractions from the column to pool. The pooled fractions were dialyzed against 10 mM Tris pH 8.0. This material was then submitted to Quality Control for final release. The release criteria were purity as determined by SDS-PAGE or HPLC, concentration as determined by Lowry assay or Amino Acid Analysis, identity as determined by amino terminal protein sequence, and endotoxin level was determined by the Limulus (LAL) assay. The protein was then vialed after filtration through a 0.22-micron filter and the antigens were frozen until needed for immunization.

[1536] To generate anti-L552S mouse monoclonal antibodies, mice were immunized IP with 50 micrograms of recombinant L552S protein that had been mixed to form an emulsion with an equal volume of Complete Freund's Adjuvant (CFA). Every three weeks animals were injected IP with 50 micrograms of recombinant L552S protein that had been mixed with an equal volume of IFA to form an emulsion. After the fourth injection, spleens were isolated and standard hybridoma fusion procedures were used to generate anti-L552S mouse monoclonal antibodies.

[1537] Anti-L552S monoclonal antibodies were screened by ELISA analysis using the bacterially expressed recombinant L552S protein as follows. 96 well plates were coated with antigen by incubating with 50 microliters (typically 1 microgram) at 4° C. for 20 hours. 250 microliters of BSA blocking buffer was added to the wells and incubated at RT for 2 hours. Plates were washed 6 times with PBS/0.01% tween. Fifty microliters of each undiluted monoclonal supernatant were added per well and incubated at room temperature for 30 minutes. Plates were washed as described above before 50 microliters of goat anti-mouse horse radish peroxidase (HRP) at a 1:10000 dilution was added and incubated at RT for 30 minutes. Plates were washed as described above and 100%P of TMB Microwell Peroxidase Substrate was added to each well. Following a 15 minutes incubation in the dark at room temperature the calorimetric reaction was stopped with 100 μl 1N H2SO4 and read immediately at 450 nm. A list of the mouse anti-L552S monoclonal antibodies that were generated, as well as their reactivity in an ELISA assay and Western blot are shown in Table 28. For Western blot analysis, recombinant L552S protein was diluted with SDS-PAGE loading buffer containing beta-mercaptoethanol, then boiled for 10 minutes prior to loading the SDS-PAGE gel. Protein was transferred to nitrocellulose and probed with each of the anti-L552S hybridoma supernatants. Anti-mouse-HRP was used to visualize the anti-L552S reactive bands by incubation in ECL substrate.

TABLE 28
ELISA AND WESTERN BLOT ANALYSIS OF L552S
MONOCLONAL ANTIBODIES

| L552S Mouse | Protein Tested | | |
|---|---|---|---|
| Monoclonal | ELISA | | Western Blot |
| Supernatant | L552S | L773PA | L552S |
| 175C11 | + | − | + |
| 175C30 | − | − | − |
| 175C63 | + | − | − |
| 175C89 | + | + | − |
| 175D3 | + | − | + |
| 175D4 | + | − | + |
| 175D5 | + | − | + |
| 175D7 | + | − | + |
| 175D9 | + | + | + |
| 175D12 | + | − | + |
| 175D14 | + | − | + |
| 175D21 | + | − | + |
| 175D31 | + | − | + |
| 175D36 | + | − | + |
| 175D37 | + | − | + |
| 175C11-1 | + | ND | + |
| 175C11-2 | + | ND | + |
| 175C11-3 | + | ND | + |
| 175C11-4 | + | ND | + |
| 175D12-1 | + | ND | + |
| 175D12-2 | + | ND | + |
| 175D12-3 | + | ND | + |
| 175D12-4 | + | ND | + |
| 175D21-1 | + | ND | + |
| 175D21-2 | + | ND | + |
| 175D21-3 | + | ND | + |
| 175D21-4 | + | ND | + |

ND: not determined

[1538] The data described in the above example show that L552 is immunogenic and can be used to generate B cell immune responses in vivo. Further, the antibodies generated herein have utility in diagnostic and passive immunotherapeutic applications.

### EXAMPLE 35

### Generation of L552S-Specific T Cells and Identification of L552S T Cell Epitopes

[1539] Described herein is the identification of specific epitopes recognized by L552S antigen-specific T cells. These experiments support the fact that the L552S protein is immunogenic and support its use as a target for vaccines and immunotherapeutics.

[1540] A pool of 20-mer peptides, overlapping by 15 amino acids, that span the entire amino acid sequence of L552S (full length amino acid sequence of L552S provided in SEQ ID NO:809) was used in in vitro culture with T cells derived from normal donor PBMC to expand CD4 and CD8 T cells. The amino acid sequence of each of the thirty 20-mer peptides and the respective DNA sequence which encodes each of these peptides is provided in Table 25 and described in Example 27. Cultures were established from multiple donors and T cell responses were monitored following successive in vitro stimulations. L552S-specific T cell responses were detected in 3 of 5 normal donors. Given that a number of tumor antigens are identified for each tumor type that are reasonable vaccine candidates, this methodology can be used to compare the antigen-specific T cell frequency of different antigens.

[1541] T cell lines were generated from normal donor PBMCs. The source of T cells was from the CD69 negative population of PBMCs that had been precultured for 1-2 days. Several different priming conditions were evaluated to identify the most efficient method. These conditions are summarized in Table 29. In all assays, the T cells were initially primed with one of the conditions described in Table 29, plus IL-12 for 2-3 days. 11-2 and IL-7 were then added to the cultures which were further cultured for one week. The cultures were then restimulated 2 or 3 times with PBMCs pulsed with the entire pool of overlapping L552S peptides. The cells were collected following the last restimulation and analyzed for antigen-specificity using an IFN-γ solubilized ELISPOT assay. As shown in Table 29, priming cultures with peptide pulsed dendritic cells (DCs) was the most effective for generating antigen-specific T cell lines, either in 96 well or 24 well plates.

TABLE 29
CONDITIONS USED TO PRIME DONOR T CELLS WITH L552S
OVERLAPPING PEPTIDES.

| Condition: | | | | | |
|---|---|---|---|---|---|
| A | Peptide-pulsed PMBCs/irradiated (overnight pulse, irradiated 11 minutes) | | | | |
| B | Peptide-pulsed DCs/irradiated (overnight pulse, irradiated 11 minutes) | | | | |
| C | Peptide-pulsed PBMCs/fixed (overnight pulse, 30 second PFA fix) | | | | |
| D | Peptide-pulsed PBMCs/mitomycin C-treated 30 minutes (overnight pulse) | | | | |
| | | | | Assay | |
| | | | | (solubilized | |
| | Condition (type of plate) | | | ELISPOT) | |
| | | | Stimulation | Target | T cell |
| Experiment: | Prime | Simulation 1 | 2-3 | Cells | response |
| I | A (96U) | A (96U) | A (24F) | D (96U) | + |
| II | B (96U) | A (96U) | A (24F) | D (96U) | +++ |
| III | C (96U) | C (96U) | C (96U) | C (96U) | − |
| IV | B (24F) | A (24F) | A (24F) | D (96U) | +++ |

Abreviations:
96U: 96 well, U-bottomed plates;
24F: 24 well, flat-bottomed plates.

[1542] Further analysis of the T cell lines generated as described above showed that these lines generally recognized target cells pulsed with whole protein antigen as well as peptides. This suggests that at least some of the T cell epitopes identified are naturally processed. The L552S T cell lines generated from donor D35, did not, however, recognize target cells pulsed with whole protein antigen. Additional analysis using anti-MHC Class I and Class II antibodies showed that, while some of the T cell response was MHC class I restricted (CD8+ T cell-mediated), most of the T cell response generated using this method was MHC class II restricted, and thus mediated by CD4+ T cells.

[1543] Following the generation of the T cell lines using a pool of overlapping peptides spanning the entire L552S molecule, target cells pulsed with pools of fewer peptides breaking the L552S into smaller regions were then used to further map the epitopes recognized by the line generated from donor D369. These experiments showed that the T cells recognized a region of L552S within peptides 19-24. The epitope was further mapped to peptide 20 (amino acid sequence set forth in SEQ ID NOs: 1964 and 2005; DNA sequence encoding peptide 20 set forth in SEQ ID NO:1993) by using individual peptide-pulsed target cells. Additional epitope mapping of the T cell line generated from donor D35 showed that T cells from this donor recognized an epitope within peptides 22-24 (amino acid sequence of the overlapping peptide of 22-24 is set forth in SEQ ID NO:2008; individual 20-mer peptides of 22-24 are provided in Table 25). Table 30 summarizes the epitope mapping analysis using different conditions described in Table 29.

TABLE 30
SUMMARY OF L552S EPITOPE ANALYSIS

| Peptide | | | | | | | | | | |
|---|---|---|---|---|---|---|---|---|---|---|
| Pool | 1-3 | 4-6 | 7-9 | 10-12 | 13-15 | 16-18 | 19-21 | 22-24 | 25-27 | 28-29 |
| Donor- | | | | | | | | | | |
| Condition: | | | | | | | | | | |
| D446-II | | + | | | | + | + | + | | |
| D446-I | | | | | | | + | + | | |
| D35-I | | | | | | + | + | ++ | | |
| D369-II | | | | | | | + | | | |
| | | | | | | | (pep- | | | |
| | | | | | | | tide | | | |
| | | | | | | | 20) | | | |

[1544] In an additional study, donor D446 was further evaluated for T cell responses against 2 other lung-specific antigens in addition to L552S. T cell lines were generated and epitopes identified from donor D446 using overlapping peptides for all three lung-specific antigens. This experiment demonstrated that a single donor can have T cell responses to multiple antigens, including L552S. In a related study, 3 different donors were analyzed for their T cell response to the same lung-specific antigen. All three donors recognized different epitopes of this antigen. Therefore, these data support the use of multiple epitopes from multiple lung tumor antigens, including L552S, in vaccine strategies for lung cancers.

[1545] In summary, a peptide pool of overlapping 20-mer peptides spanning the entire L552S protein were used to generate T cell lines and to map T cell epitopes recognized by these lines. Most, but not all, the T cell lines also recognized whole protein pulsed target cells suggesting that at least some of the epitopes are naturally processed. Furthermore, the responses to targets pulsed with pooled or individual peptides were equal or higher than those to target cells pulsed with whole protein showing that this technique is more sensitive for detecting immune responses. Moreover, this technique can be used for all individuals, regardless of their HLA type. An additional advantage of this approach to evaluating T cell responses to lung-specific antigens is responses to E. coli and viral antigens is avoided. Given that a number of tumor antigens can be identified for each tumor type that are attractive vaccine candidates, this methodology can be used to compare the antigen-specific T cell frequency of different antigens. Finally, the experiments described above further confirm that the L552S lung tumor antigen is immunogenic and support its use as a target for vaccine and immunotherapies.

### EXAMPLE 36

### Induction of L984P-Specific CD8+ T Cells and Identification of L984P T Cell Epitopes

[1546] This example describes the in vitro generation of CD8+ T cells specific for the lung tumor angien, L984P, and the identification of the specific, naturally processed epitopes recognized by these T cells, using the methods essentially as described above in Example 35. These experiments further demonstrate that L984P is immunogenic and support its use as a target for vaccines and other immunotherapies.

[1547] A pool of 20-mer peptides, overlapping by 10 amino acids, that span the entire amino acid sequence of L984P (full-length amino acid sequence of L984P provided in SEQ ID NO:1869) were synthesized. Due to the difficulty in synthesizing the glutamine (O) repeat of the L984P protein, the first 10 glutamine residues of this region were not included in the overlapping peptides. The L984P peptides and overlapping peptides from 3 other lung tumor antigens were mixed into one “super peptide pool”. This super pool was used to pulse autologous DCs which were then used to stimulate T cells derived from normal donor PBMC (donor D366). Following 3 rounds of stimulation, analysis of IFNγ production showed that the highest responses were seen to L984P with lower responses observed to the other three antigen pools. After 5 rounds of stimulation, the difference in responses between L984P and the other lung tumor antigens was even more pronounced, indicating preferential expansion of the L984P-specific T cells over time in vitro using this super peptide pool.

[1548] T cell responses from two additional donors (D223 and D446) were then analyzed. This experiment indicated that different epitopes of the L984P protein were recognized in the three donors. D223 T cells produced IFNγ in response to stimulation with pool C of L984P, D366 in response to pool A and D446 in response to pool B. Flow cytometric analysis indicated that the vast majority of the expanded T cells from D223, D366, and D446 were CD8+ (84%, 64%, and 67%, respectively; CD4+ T cell percentages were 7%, 5%, and 1.7%, respectively). Addition of anti-MHC class I blocking antibodies to the cultures followed by analysis of IFNγ production confirmed that the responses were largely MHC class I restricted and mediated by CD8+ T cells.

[1549] Further analysis of the L984P-specific CD8+ T cells from D336 mapped the epitope recognized in this donor to pool A, peptide #3 (amino acid sequence set forth in SEQ ID NO:2011). Similar analysis in donor 223 mapped the epitope to peptide #17 (amino acid sequence set forth in SEQ ID NO:2010). Responses to L984P protein loaded DCs were also observed although, they were lower than the response to peptide pulsed PBMC/DC. This suggests that at least some of the epitopes identified are naturally processed. Thus, these experiments further demonstrate that L984P is immunogenic and support its use as a target for vaccines and immunotherapies. Furthermore, these studies defined illustrative naturally processed peptide epitopes of the L984P tumor antigen that may be used in such strategies.

[1550] From the foregoing it will be appreciated that, although specific embodiments of the invention have been described herein for purposes of illustration, various modifications may be made without deviating from the spirit and scope of the invention. Accordingly, the invention is not limited except as by the appended claims.

The application's sequence listing, which the Patent Office published only in electronic form, follows.

SEQUENCE LISTING (2011 sequences)

SEQ ID NO: 1 - DNA, 527 bp, Homo sapiens
ccaccagtccacaaatgtgactggtaagggatctagtaacagaggatggagttgggcagaatattatcctggatgatatgcacccagcactagaatacacctttcattagaatgaagagaacagacaaagccctcagaaaagatacaaaggcagagacattgattagaacattatctcataacagaggtggggccattacccaccattattgtaaaataactgtaactaaccaaaacacatacaggcttctttaatggagttaataaaactatggcacattgggaatcaggggcagaggtactgttcccagacggaaaactgggataaagggagccatgctgacagggccttattccagtctaggttgttagaaaggagccctagcccagaaatgacagcaaatagccataatcattatgtggggctgaaccagaggaagccaggctgagccaagaagctggaagtatcttgaacggctctccaaatccaaagattatccatactctttatccctccagcgatgtgt

SEQ ID NO: 2 - DNA, 490 bp, Homo sapiens
ccaagagttctccactgtgaagactgaaaggacctggtgacatttcggcatcagtcctgttaccacttggaggtaacagaagcaggctcgtgtcctcctttaattctaccacactacatgactcgcaattggttctgaaattagaacgttcaccatcgtacttaaaatcttaggggcatgaagagtcagctagaacaaggaaaaagaaagtcgcaggtagtaggtaagtaggtgggcacatgaaaagccaagctgctctgtccaacaccagtgtacatgtgctttaactaaatgaactccagaggccaacagcagcagacctgctcaattcaccttccaaatcagaacaagaccaaaaagctcaggcttgagttgtcaactatgcataggttccgccagtgctgaggggtgtgaggctctagttgtgaagaagctacaagaaatcatgatgcatgtgatctgggccgcactggcatttgcagctattcag

SEQ ID NO: 3 - DNA, 464 bp, Homo sapiens
ggagctgtgggctcagtcgtggggcagattgcaaagctcaagggctgcaaagttgttggagcagtagggtctgatgaaaaggttgcctaccttcaaaagcttggatttgatgtcgtctttaactacaagacggtagagtctttggaagaaaccttgaagaaagcgtctcctgatggttatgattgttattttgataatgtaggtggagagttttcaaacactgttatcggccagatgaagaaatttggaaggattgccatatgtggagccatctctacatataacagaaccggcccacttcccccaggcccacccccagagattgttatctatcaggagcttcgcatggaagcttttgtcgtctaccgctggcaaggagatgcccgccaaaaagctctgaaggacttgctgaaatgggtcttagagtttaaatttcagcttccctactttgtaattgactgact

SEQ ID NO: 4 - DNA, 510 bp, Homo sapiens
ccttatcacactgtaagtggtccaagcccatagggatgctctttttggttcctggaatttccagttggatgtgacagagatctttcagtataggtctaagtcaagagtagcctctgggttgaggtgggctgggagattaacatcttacctggggtccttcagataaacctgttggtttttcctgtctcatacaggcccatcttaagttttgatgttgaattaaaactacttctacccccttagttataaaaaaggccacaaggagcatttatgtggatatctggaagtgagatagttattccattcccaggaaaagaaaaataaagctaagttacaaaactaaatctatatgcaataaagttattatatactgctttgtttaagcagagtcctctggaatttatgtacagtacattagttttcagctatttatattccacaagttagaccttaagattctctggttttaagacaattgttaaagatacttctaaagctctgagcagttca

SEQ ID NO: 5 - DNA, 452 bp, Homo sapiens
acagcgcctcacgcacctgagccccgaggagaaggcgctgaggaggaaactgaaaaacagagtagcagctcagactgccagagatcgaaagaaggctcgaatgagtgagctggaacagcaagtggtagatttagaagaagagaaccaaaaacttttgctagaaaatcagcttttacgagagaaaactcatggccttgtagttgagaaccaggagttaagacagcgcttggggatggatgccctggttgctgaagaggaggcggaagccaaggtaaatcatctcctttatttggtgcctcatgtgagtactggttccaagtgacatgacccagcgattatgtttacagtctggacttctgatcaagagcgttcttgaaattttccttcagttttaagacattttcatgcaggcagagtgttcttcccctaaaggcacttgacactcatttttt

SEQ ID NO: 6 - DNA, 336 bp, Homo sapiens
tatagagtgctgacatctgacattgagaaattcatgcctattgtttatactcccactgtgggtctggcttgccaacaatatagtttggtgtttcggaagccaagaggtctctttattactatccacgatcgagggcatattgcttcagttctcaatgcatggccagaagatgtcatcaaggccattgtggtgactgatggagagcgtattcttggcttgggagaccttggctgtaatggaatgggcatccctgtgggtaaattggctctatatacagcttgcggagggatgaatcctcaagaatgtctgcctgtcattctggatgtgggaaccgaa

SEQ ID NO: 7 - DNA, 376 bp, Homo sapiens
ctgtgggaaacctcattgttctgtacaaagtactagctaaaccagaaaggtgattccaggaggagttagccaaacaacaacaaaaacaaaaaatgtgctgttcaagttttcagctttaagatatctttggataatgttatttctattttttattttttttcattagaagttaccaaattaagatggtaagacctctgagaccaaaattttgtcccatctctaccccctcacaactgcttacagaatggatcatgtcccccttatgttgaggtgaccacttaattgctttcctgcctccttgaaagaaagaaagaaagaagactgtgtttttgccactgatttagccatgtgaaactcatctcattacccttttctg

SEQ ID NO: 8 - DNA, 406 bp, Homo sapiens
ggtagggagcaattctattatttggcattgcatggctgggttgaattaaaacagggagtgagaacaggtgagtctagaagtccaactctgaaaaggaccactgtacatttgaacacacggctgtgttaaagatgctgctaatgtcagtcactgggtgcactaaaggatctcttattttatgtaaaacgttgggattgacaagatagatctgatactctgttaagttaccctctgaagctacttcttgtgaaatactaatgacagcatcatcctgccaagcgaaagaggcaggcataagcaaggacaaattaaaagggggtaagagccttatcatgatgaggagtcttgttttgacatcttgggaaaagctgtccatagtgtgaagtcgtcaatttctcaccatggt

SEQ ID NO: 9 - DNA, 330 bp, Homo sapiens
actactaccaagagctgcagagagacatttctgaaatgtttttgcagatttataaacaagggggttttctgggcctctccaatattaagttcaggccaggatctgtggtggtacaattgactctggccttccgagaaggtaccatcaatgtccacgacgtggagacacagttcaatcagtataaaacggaagcagcctctcgatataacctgacgatctcagacgtcagcgtgagtgatgtgccatttcctttctctgcccagtctggggctggggtgccaggctggggcatcgcgctgctggtgctggtctgtgttctggttgcgctgg

SEQ ID NO: 10 - DNA, 449 bp, Homo sapiens
ctgacggctttgctgtcccagagccgcctaaacgcaagaaaagtcgatgggacagttagaggggatgtgctaaagcgtgaaatcagttgtccttaatttttagaaagattttggtaactaggtgtctcagggctgggttggggtccaaagtgtaaggaccccctgcccttagtggagagctggagcttggagacattaccccttcatcagaaggaattttcggatgttttcttgggaagctgttttggtccttggaagcagtgagagctgggaagcttcttttggctctaggtgagttgtcatgcgggtaagttgaggttatcttgggataaagggtcttctagggcacaaaactcactctaggtttatattgtatgtagcttatattttttactaaggtgtcaccttataagcatctataaattgagttctttttcttagttgtatgg

SEQ ID NO: 11 - DNA, 472 bp, Homo sapiens
cctcgatgcatgctgctctacctctcatcagcccacagtctgacacgaggtcatctttggtctgtggtgaggtatggatgtctgcagtctacacaacagccctgcagaacgggcctggacaacccttgggggataagacagccacacatggctcaggctgttaggtgtccactgtcacagtccaaagagaaaggtacggcctccaagggggcagcttaagccaacatgtaagacttgggcacgatgaaaggacgggggtccagctacgaatgtttttgttcttgatgtcaagttgccagctactggaaggcaggagcagtttcttctttttcccactctgtgctgggtacttgggagaggcgaaataaataccagactgtccactcctcagcctaaggtccttctcaagtcctgcacactcagcacttgctctttaacgtggcatatgttcccccatcttcccctggtaatg

SEQ ID NO: 12 - DNA, 371 bp, Homo sapiens
ttttttttttttttttttttttttggaratttgkcacattttattcagwatttctgctgcactgccagcctagggatgcacttgattcccaagaaatgcaactgtcctattcgcaragccgtccacaggtacctaccccctggactgcagcaactttattaccttaactagcacaraacagaggttgatttaaactccttacactcacttctcaratcaatgaatgggcaaaraaacmcctcatggctctgggaaggcatgctgaracccgtttttgcaagtcctgaggaatggaaraatatagctgccaggtatcccaagtctagggcagggagggkagtatcggcatcactttcactgcattctgttgg

SEQ ID NO: 13 - DNA, 493 bp, Homo sapiens
  misc_feature 198, 199, 200, 201, 202, 203, 204, 205, 206, 207, 208, 209,210, 211, 212, 213, 214, 215, 216, 217, 218, 219, 220, 221,222, 223, 224, 225, 226, 227, 228, 229, 230, 231, 232, 233,234, 235, 236, 237, 238, 239: n = A,T,C or G
ccagtccaacctgctcctcattattgtataaatgagcagaatcaatatggcggaagccagctycaattgccaatttggtggcctctaaagctttacttttaggaacctctgcaggcgcataggtgccaaatcccaggacaggcatgaagtgaccatcattcagcttcacacactgatatttcgaatccatttctgtcnnnnnnnnnnnnnnnnnnnnnnnnnnnnnnnnnnnnnnnnnnccaacctgctcctcattattgtaaacatgtgcagaatcaatatggcggaacccagcttctattgctaattttgtgacctccaaagctttacttctcggaaccttggttcttccgagcgctcagcaatcccgccgagcttctttgagacgtcctcaggtgtcctttgacgatgcgtcctccactttcacacactctagcattccttcactggggtcttcattgccccacattgggcagccaggaatgttggggtg

SEQ ID NO: 14 - DNA, 540 bp, Homo sapiens
ccagatggtccataatatgtcaccgagcaggtgaatggcatttgtatgtcagccttggttgtcttgtactccagggtggaagtcatggtatagagctgagtcactgggtccatttcctttttaaaattatgaccaccgctccttcaaggggatgtagcacttttccattcctgtaccatgtgatattgccatctggataactgtcttctgaaatgcagtcacccaacttttttagctgctctgtttcgagaaacagtgctttgcttacaatttcaggtttagatggttgcttgaacaccttgactattgtaggtgcctcaaacacgttgtcctcagttactagcatgcacacaaatctcttttcatcactgatccttgcattactgatagacaaagtgtagttttctgagaggttcaatctgtctttgtattctggtacatcgtcgtactgcacacttttctttgtagaggatctgaaggcaataaatactggggagccatcgggcttttcatatttccatttgcccaaacatgagattc

SEQ ID NO: 15 - DNA, 421 bp, Homo sapiens
tacccacctccagcctcccatgtgagcctgtccttatgtatagtgtccaacctctgattctagcagtcaagtgtcttccccaatcctaatgtcccctgatatgtctctagcgacttgaccatctcttgttccttgggactggggccagcctcttgtctgcccacttccctctcattagtcagatagccccaaaggctctatctttagctcccagagaactttttggtcctcagtatttcccttcccctttccttcctattccccacaactgggggagggaagggagaacaggggcacctgatcatcaatctcccctgcccctctcttgaagccccctagatttggatgaagagcaggccagtgagcagggcaaagcctgctaggagcagaatgaccttgaggatcctttgctcagaactgg

SEQ ID NO: 16 - DNA, 236 bp, Homo sapiens
gccgtgtgtgcttttcccagtgccgaggtacctatcgctcacggccaggagcttgtcgtggctgacagcaaagagctgctctctgtgggcctgcttcatctcatccgagaggccgtacaagaagtggtccattcctttgtctgaaggagcgacaggagcatctacggttgagaagacagaaagtttggcttcgtcgatgtcttgctgtgtgaattttccagacttagcccagtcga

SEQ ID NO: 17 - DNA, 424 bp, Homo sapiens
ccagaaaggtgacagtggttttccagggcctcctgggcctccaggtccacctggtgaagtcattcagcctttaccaatcttgtcctccaaaaaaacgagaagacatactgaaggcatgcaagcagatgcagatgataatattcttgattactcggatggaatggaagaaatatttggttccctcaattccctgaaacaagacatcgagcatatgaaatttccaatgggtactcagaccaatccagcccgaacttgtaaagacctgcaactcagccatcctgacttcccagatggtgaatattggattgatcctaaccaaggttgctcaggagattccttcaaagtttactgtaatttcacatctggtggtgagacttgcatttatccagacaaaaaatctgagggagtaagaatttcatcatgg

SEQ ID NO: 18 - DNA, 154 bp, Homo sapiens
gtcaccaactccttcagcgcctccacagggstttcggacatgacagcaaccttttctcccaggacaattgaaatttgctaaagggaaaggggaaagaaagggaaaagggagaaaaagaaacacaagagacttaaaggacaggaggaggagatgg

SEQ ID NO: 19 - DNA, 445 bp, Homo sapiens
caacaaaattggtgaacacatggaagaacatggcatcaagtttataagacagttcgtaccaattaaagttgaacaaattgaagcagggacaccaggccgactcagagtagtagctcagtccaccaatagtgaggaaatcattgaaggagaatataatacggtgatgctggcaataggaagagatgcttgcacaagaaaaattggcttagaaaccgtaggggtgaagataaatgaaaagactggaaaaatacctgtcacagatgaagaacagaccaatgtgccttacatctatgccattggcgatatattggaggataaggtggagctcaccccagttgcaatccaggcaggaagattgctggctcagaggctctatgcaggttccactgtcaaagtgtgactatgaaaatgttccaaccactgtatttactcctttggaatatgg

SEQ ID NO: 20 - DNA, 211 bp, Homo sapiens
gggtgccactgcctgcttgaaagcactttctgaacctacagaagttgggtattgtctgaaatcccagaggacccataagtgccggtgacaagctgtctgtcaggggagaggctccagaacctgggttcgtccccagtgagaccggaggatgatcccccaaggactgcgcagcatcagctcttggtgggcctctgccttctcttctgtttgg

SEQ ID NO: 21 - DNA, 396 bp, Homo sapiens
tgcccctgtattggattgccacacggctcacattgcatgcaagtttgctgagctgaaggaaaagattgatcgccgttctggtaaaaagctggaagatggccctaaattcttgaagtctggtgatgctgccattgttgatatggttcctggcaagcccatgtgtgttgagagcttctcagactatccacctttgggtcgctttgctgttcgtgatatgagacagacagttgcggtgggtgtcatcaaagcagtggacaagaaggctgctggagctggcaaggtcaccaagtctgcccagaaagctcagaaggctaaatgaatattatccctaatacctgccaccccactcttaatcagtggtggaagaacggtctcagaactgtttgtttcaattgg

SEQ ID NO: 22 - DNA, 277 bp, Homo sapiens
ggaaccatgtggccggcgcccttgatcgtgagaaaggcgatgtgggagaactccttcacgaagccggcaatctgctccccgctgtccccgtacttcactaaccagggccggcgctgcacctccatcttctggttgagggaatccacaaaccactcatcccccatgaaattgcaggccatgtctacatctccattatataataggatctgggatttctgtgagctaagcagcttcagatactgggagttcatgcttcggtagagacggcggtactgta

SEQ ID NO: 23 - DNA, 634 bp, Homo sapiens
tctgaccatccatatccaatgttctcatttaaacattacccagcatcattgtttataatcagaaactctggtccttctgtctggtggcacttagagtcttttgtgccataatgcagcagtatggagggaggattttatggagaaatggggatagtcttcatgaccacaaataaataaaggaaaactaagctgcattgtgggttttgaaaaggttattatacttcttaacaattctttttttcagggacttttctagctgtatgactgttacttgaccttctttgaaaagcattcccaaaatgctctattttagatagattaacattaaccaacataattttttttagatcgagtcagcataaatttctaagtcagcctctagtcgtggttcatctctttcacctgcattttatttggtgtttgtctgaagaaaggaaagaggaaagcaaatacgaattgtactatttgtaccaaatctttgggattcattggcaaataatttcagtgtggtgtattattaaatagaaaaaaaaaattttgtttcctaggttgaaggtctaattgatacgtttgacttatgatgaccatttatgcactttcaaatgaatttgctttcaaaataaatgaagagcag

SEQ ID NO: 24 - DNA, 512 bp, Homo sapiens
gcaaaacaagcctaagcaagcacaacgaagagcagaagtcagtgaaattaaaaagaggaaaaagaaaaatcataaaaatcataaaaagttatttctttgaaaagatcaatgaaatttagcaagactgacacagataaaaaggaattagacccaaatcagtgaacaggaatgaaatagaggatatcactacagaggctgcagccattgaaaggataattaggaaatcccacagataactttgtgctcataaatttgacaatgtagaggaaatatctttagttttaattagctttttattttagtttttctcaaaaactaaaacttaataaaactcaaccaagacaaaatagacaatcagaatgtaggcatacctcagagatgtggcggatttggtttcagactactgcaataaaccaaatatggcaataaaaggagtcacagaaagtggtttcccagtgtatatatataaaagttacatttactctatgaagtgcaataacattttgtctaaa

SEQ ID NO: 25 - DNA, 461 bp, Homo sapiens
ctctgtttcagcacctcattgggattattgaactcattaaattctttacatgaacttgaattgttcattgaaatctctagccatttccctggttaaacaggataatctttttttttcactaaagaacattcgtggtggtttagtgatgaggttaatattcccctcttgtccacctccacattggaaaaaccacgttggactgagttttgaggagcaaagaactaatcacttgaccaaaggggccctgtatccccacaagccctgggtatttttctctcatagagagaagagggtctgtatggatacctgaaaatgtgattttatatattcttggcatccaggggagaaaaatcaaaaagcaaggaagttacagttatctccccagaaattaatgggtcatgtcaagactataggttttcatttccttctgttgcttgttagaatgatgttcttgtgggaaa

SEQ ID NO: 26 - DNA, 317 bp, Homo sapiens
tgctggagtcggaactgctgcctttgtttggcggccttgtttcttaaatcagttccctcttaggatttattacactaaaaaaaaattagtttttgaaaagaaataggagaatacagaaacatgaatttcacgaggctatcatctaacagtgggggctttctacacacgtggtgccaaaatgtgtcattctgagtcaattgcaattcctctctaggagtgaaaagagataaaagataagccaagaaccctggacagattcttggtgttggtgacaaagaggaaaggacctgagaatggggctggtggggagagggggg

SEQ ID NO: 27 - DNA, 250 bp, Homo sapiens
taattgctgtgattattagaattctatcatgactgtattgtagtttttgctctattycagataagcmagatctaagaagttatcaaaactattctttaaaatgctaaagcaggtaactttttcttccattattttttcctcctaccactgagttttgtaatgaattccttgtgtatacaagcaatacaggtgaatactaaactgttatttttagcttcttcaaaagctattttagaaagcttcctggaaa

SEQ ID NO: 28 - DNA, 532 bp, Homo sapiens
cctatatcattcatttatacagaagctgcttgctgcttagcaagttggtgggtttgattttccttggttgctttgcagacctcccttgagaggattccttctggatggagatttctttgttgctgtctcccttgccacaactctgaccaagattgcattgcgctatgtagctttggttcaggagaagaaaaagcaaaattcttttgttgctgaggctatgttgctcatggctactatcctgcatttgggaaaatcctctcttcctaagaagccaattactgatgatgatgtggatcgaatttccctgtgcctcaaggtcttgtctgaatgttcacctttaatgaatgacattttcaataaggaatgcagacagtccctttctcacatgttatctgctaaactagaagaagagaaattatcccaaaagaaagaatctgaaaagaggaatgtgacagtacagcctgatgaccccatttccttcatgcaactaactgctaagaatgaaatgaactgcaaggaagatcagtttcag

SEQ ID NO: 29 - DNA, 486 bp, Homo sapiens
ctgtttttggacttaattaacywttgcaagtggaaaccaagaaataattgtagcataactctctctattgtcatgttgcttctttctgcaaatatatcttacaagttagactttaaacctttgatctcccacaccaaaagagaaaataatatttatatggaagtaattttattttagtgtttgtgatttattgtggagagcaggbgtttaaaaattttagaatttctttttaacaaaatcaaatacattgttaaggtaacaaagaataattcactatttcagcatttcaaagcaacatattctacaacttcaaagatatttgcaaaaataatacaactgttgaagttcaaatgttatggaaagaaacattagaagtatgaaaagtggtacaaaaacatgtttctttttattctcttggatatatatctatatatttaggaaaatacatatatgtatgtgtatgtatatatatgtatgaaaatatac

SEQ ID NO: 30 - DNA, 240 bp, Homo sapiens
aagacctgaggaaggaaaacaaattggcttcctgctgaagaakcaaaatagacattttttaatgtctcttgaccccagttccaagttcaccctgttgcctgttcttcctcccaccttttggggttctataactgcatcccccacacatctttcaccaccaccccatacataccagctctcctgttgtgggattcaggacataggaagagttgctgaaggcacgggtgcttttgggattcg

SEQ ID NO: 31 - DNA, 233 bp, Homo sapiens
ccattgatgcaggatatcggcacattgactgtgcctatgtctatcagaatgaacatgaagtgggggaagccatccaagagaagatccaagagaaggctgtgaagcgggaggacctgttcatcgtcagcaagttgtggcccactttctttgagagaccccttgtgaggaaagcctttgagaagaccctcaaggacctgaagctgagctatctggacgtctatcttattcactgg

SEQ ID NO: 32 - DNA, 233 bp, Homo sapiens
gaggaatgctggactggaggcccctggagccagatggcaagagggtgacagcttcctttcctgtgtgtactctgtccagttcctttagaaaaaatggatgcccagaggactcccaaccctggcttggggtcaagaaacagccagcaagagttaggggccttagggcactgggctgttgttccattgaagccgactctggccctggcccttacttgcttctctagctctctagg

SEQ ID NO: 33 - DNA, 319 bp, Homo sapiens
ctgggcctggatggtctaggatagccttactcacttgcctggcaggtgacaggctgttggctggaattgcttggttctcctccatgtggcctctccagtaggctagctcaggcttattcacatgatggcttcaggattccaaagagagtgagagtagaagctgaaagacttcttgagttcttggcctggaactgggactaggacagtgtcacttctgctaagttcttttggtcagagcaaatcacaaggctttacccagattcaagggatgagaaacagactacatgtcttgatgaggggaaccacaaagagcttgtgg

SEQ ID NO: 34 - DNA, 340 bp, Homo sapiens
tacagatttaattcatgttattaactccctgccttttacctcctccctcctcccttggcacaactgccagatggatgtggctggaagtcagaggacattctcgtgggttcgtgggcctagggtacaaatgacctcagcgtgacagcaaacaggacagagaagaccaggctcttactcaggaatccaccagccaggagaatgacaatgttgaacaccggaaccctgatgatatctgtcacatttgtaaggttgatttcagagtcaggagtggagacatcggcagttgacttgggtggagcttgggtcacagttctggggctggtatagagtgggcacaagg

SEQ ID NO: 35 - DNA, 170 bp, Homo sapiens
acatgggtccttcactcctcgctgagatgttgcggcagccttttcttccaatgcggttgtggcaggagaatccacggatgtaatgttttcacctttttccctgagggtgctttctgaggaaccagyccttaagaggtggggtcttggattcctgacccaggcgtccggca

SEQ ID NO: 36 - DNA, 475 bp, Homo sapiens
ctgtttttggacttaattaaccattgcaagtggaaaccaagaaataattgtagcataactctctctattgkcatgttgcttctttctgcaaatatatcttagaagttagactttaaacctttgatctcccacaccaaaagagaaaataatatttatatggaagtaattttattttagtgtttgtgatttattgtggagagcaggtgtttaaaaattttagaatttctttaacaaaattctaaagagaaaataaaaaagaaatcacagtatttacagagataacagaatggcttagccatgcaaaacaaataactttggtttttccccttttactttggtttaaatgttgaccaagattcaattttttttcctgccaaataaaacttcaataaaagtttagaggcaaaataacgtattttctttttttcccataatattttatacagcatcgagtctaagaatattttatgcattt

SEQ ID NO: 37 - DNA, 246 bp, Homo sapiens
ccttgagcttgggccgggcactgaggcgccccacatatgctgagagcagggggaacgcatccaggcagccaggggctaggacctcatggatcagcagcaagtccagcaggttgtagtcagcgaaggagatctggtctcccacaatgaaggtcttgcctccctggttctgggacagcagggtctcaaaaggcttcagttgcccgggcagtgccttcacatagtcatccttgcccacctcatagttgg

SEQ ID NO: 38 - DNA, 512 bp, Homo sapiens
gctggaagtgaaatgcagatcagacccattgtgatgtcacagaaagatggggacaggccaaagaaaaaagtgactttcaactcttcttccatcatttttatcatcaccagtgatgaatcactgtcagttgacgacagcgacaaaaccaatgggtccaaagttgatgtaatccaagttcgtcctttgtaggaatgaagaatggcaacgaaagatggggccttaaattggatgccacttttggactttcatcataagaagtgtctggaatacccgttctatgtaatatcaacagaaccttgtggtccagcaggaaatccgaattgcccatatgctcttgggcctcaggaagaggttgaacaaaaacaaattcttttaattcaacgggtgctttacataatgaaaaaaccacttgtggcacacgatgggcatctaacatcatcatcttctaatgtgttggagattttcatttcaaatatattttttaaattactctattttccaaaacacgtaat

SEQ ID NO: 39 - DNA, 370 bp, Homo sapiens
ttttatgaacaagatataaggatcaaaaaaaagggtgttgatatgtttttccaagcagagatgtactcgactctgtcctatttagccttcccatacctgacttctaatcacttttcctggtgccctyccatctccctaaccccccctcacagggatgcctcctcccaaggctccagaaactctgaccctcgcactgctggagggagcccatgaattgctggtcaatatcgctcatcctctakactccatcctgcgtgtgcttcttcctacaagagctagagaggcactgactgataaatacctgtcacctgcccctttcccagagggtgaaactccacccactcccactgcagaaatgaatcttaaatgg

SEQ ID NO: 40 - DNA, 204 bp, Homo sapiens
cctgagggttttccctttaaattttcattgagttgtccatctccagcatatagggcttcaggagcagagcagaccttgtttttagtggttccatgggataaaatgggattggaggagctagaagaattcagggtctggtccaatctgccagtcttcctgaaatatcgaaaatacaccagggctgctatatcagagccaccctgg

SEQ ID NO: 41 - DNA, 447 bp, Homo sapiens
caggcagcaattcgtaaagaattaaatgagtacaaaagtaatgaaatggaggtacatgcatcaagcaagcacttgacaagattccacaggccatagagattttcttctgagaagaatttgtgtttaattttttgataccaacactgaacattcatcagggaactttcctgaagttcagctcaagactaccctacctgctgtgtttgtgagaagagtaggatcacacacacaggtgcaatcttgaccacacttacctgcaagaggagtaaccagaggacacacttccttccttctttggtgtctgaggagtgtgaactgttggggtcagttaagacccaacataactctatcagaagaaaactgttgtttgcctttcaaccttgttttacagttctgcagtgtagtggaggacgggcaacgtgcatgtgcaggctcaccactcccagg

SEQ ID NO: 42 - DNA, 498 bp, Homo sapiens
ctggttttgtaaaaacagtctctttattctactgtgctgaaaccctcaccaatatagaaaattagattctcattgcactgaactatatttatatgcctaagtatgtagaagtaaaattatataccccaaaaggattttatcttgttgtatatattaaatgttatttctgcatatagggtcttttatggagaaactgatgatgataagcttaatactcacttgtttagcagcatctgaatgcacaaatgctttatatatctcttctgctttacagggcaaaagatcagactctgttttcttatagtcttcacaagccagccagaactcaatattctcctcactgaattcagactttaggaaacttccaaagacattttgaccagtttggttggcaagaagtttttccagagattgagaccattgcattacttcagcagcagaaagtacatccttggacttggaagatttcattccagattccagatgtgggatcataga

SEQ ID NO: 43 - DNA, 312 bp, Homo sapiens
caggaaggcggccaagaatgtgagtgcaaagattggttcctgagagccccgagaagaaaattcatgacagtgtctgggctgccaaagaagcagtgcccctgtgatcatttcaagggcaatgtgaagaaaacaagacaccaaaggcaccacagaaagccaaacaagcattccagagcctgccagcaatttctcaaacaatgtcagctaagaagctttgctctgcctttgtaggagctctgagcgcccactcttccaattaaacattctcagccaagaagacagtgagcacacctaccagacactcttcttctc

SEQ ID NO: 44 - DNA, 417 bp, Homo sapiens
ctaacacatttactctccactattcgtactctggtagccatgttaaccccatcagagattccttctcaagccatgtctcagagctgagaggcatcccagcaagttttgcagctcacagttttttccgtaaattacttattctataaaattggagtaggccataaactttggagggccctagaccaattttttggattatttttcgtcttctatcattccgctgatcttagatattctctgcattaaatattaaatatcacttctaggctgaaaaatccccctaaaaatatttctagctcagatttttcctccaaattctgcaatagaagatcacaatgtgaactctgcatctccatgttaaagtctaatggacattcacacttagcatgtctcaaagaaatctcatgtaaaccatgg

SEQ ID NO: 45 - DNA, 494 bp, Homo sapiens
cgcgtgtctgtggtatgtgtacacgtgcatgttctgcatgtctgtaggtcacacatgctttggtgcatgtacacgtgtgtgtgtgtatgcgtgtaggagctcacacttgtgtacacgtttgtgtgcatgcatgtgtgcaggagcttgcacgtttgtggtgggtacatgtacatatgtgagtgatcctgtgtgcaagcccccatgtggacatggctatgagtgagcgtggagccaaaagccaggtaacacgcatgcagcaggcccactgtgcgtgtctgagacggtctgtggcagggactgggtgtgaatcatgcagcaggcccactgtgcgtgtctgagacggtctgtggcagggactgggtgtgaatcagtgaccgtgtctctgaccaacatgctgaattacaaattgataatttattaacctgtgcagcaacaaataagatttttcaaaactcaacaaagtgctcaaagttgacattacttgcttcaaagtt

SEQ ID NO: 46 - DNA, 516 bp, Homo sapiens
ccagtccaacctgctcctcattattgtataaatgagcagaatctatatggcggaacccagcttctattgctaattttgtgacctccaaagctttacttctcggaacctcctcctttggccgtcatttgatcattcaactctttgtcagtggcaactcccgctattttggtgtgttggtttgttactacacagtgagcacaaacatggtggtccaatacagaggctcttcctgtcaggtgtcaaccagaaagttcatctaacactgtgatatttgcatccttcttgaacagttgttggctgaagattcatttgatgaatcgatttttcaaaagagatgattcttggttcttccgagcgctcagctctcccgccgagcttctttgagacgtcctcaggtgtcctttgacgatgcgtcctccactttcacacactctagcattccttcactggggtcttcattgccccacattgggcagccaggaatgttggggtgatcagacacaacaccaggtcatg

SEQ ID NO: 47 - DNA, 459 bp, Homo sapiens
ccaattcagagtggcattctgcatttctgtggcttccaagtcttagaacctcaactgacatatagcattgggcacactccagcagacgcccgaattcaaatcctggaaggatggaagaaacgcctggagaatatttgggatgagacaccactgtattttgctccaagcagcctctttgacctaaacttccaggcaggattcttaatgaaaaaagaggtacaggatgaggagaaaaacaagaaatttggcctttctgtgggccatcacttgggcaagtccatcccaactgacaaccagatcaaagctagaaaatgagattccttagcctggatttccttctaacatgttatcaaatctgggtatctttccaggcttccctgacttgctttagtttttaagatttgtgtttttctttttccacaaggaataaatgagagggaatcgaksaaaaaaaaaaaa

SEQ ID NO: 48 - DNA, 430 bp, Homo sapiens
cctatattcagccacagcctctgggagtggtgctgataatcggagcttggaattaccccttcgttctcaccattcagccactgataggagccatcgctgcaggaaatgctgtgattataaagccttctgaactgagtgaaaatacagccaagatcttggcaaagcttctccctcagtatttagaccaggatctctatattgttattaatggtggtgttgaggaaaccacggagctcctgaagcagcgatttgaccacattttctatacgggaaacactgcggttggcaaaattgtcatggaagctgctgccaagcatctgacccctgtgactcttgaactgggagggaaaagtccatgttatattgataaagattgtgacctggacattgtttgcagacgcataacctggggaaaatacatgaattgtgg

SEQ ID NO: 49 - DNA, 288 bp, Homo sapiens
ccatccgaagcaagattkcagatggcagtgtgaagagagaagacatattctacacttcaaagctttggwgcaattcccatcgaccagagttggtccgaccagccttggaaaggtcactgaaaaatcttcaattggattatgttgacctctaccttattcattttccagtgtctgtaaagccaggtgaggaagtgatcccaaaagatgaaaatggaaaaatactatttgacacagtggatctctgtgccacgtgggaggccrtggagaagtgtaaagatgcaggattgg

SEQ ID NO: 50 - DNA, 411 bp, Homo sapiens
ccagagaatgacattcatgtccccgtggatcccttgcagagagtacatggagccactgccaccagtggtgatggaaagcactgtcttcttactccggaagggtcctttgtcatacatggcagcgtaagtgtaagcaaactctcctatgaacactcgctcaaaccagcctttcagaatggcagggactccaaaccactgcagggggaactggaatatcacaaggtctgcggcttccagcttcttttgttcagccacaatatctgggctcagatggccttctttataagccagaacagactcggcaggatactgaaagttcgcagggtccttcagtttacctgtgatgtcctttctggaaatgatgggattgaagttcatggcatagaggtccgactccaccacctcccatcc

SEQ ID NO: 51 - DNA, 503 bp, Homo sapiens
gatatcttatgattaaaaacaaattaaattttaaaacacctgaagatatattagaagaaattgtgcaccctccacaaaacatacaaagtttaaaagtttggatctttttctcagcaggtatcagttgtaaataatgaattaggggccaaaatgcaaaacgaaaaatgaagcagctacatgtagttagtaatttctagtttgaactgtaattgaatattgtggcttcatatgtattattttatattgtacttttttcattattgatggtttggactttaataagagaaattccatagtttttaatatcccagaagtgagacaatttgaacagtgtattctagaaaacaatacactaactgaacagaagtgaatgcttatatatattatgatagccttaaacctttttcctctaatgccttaactgtcaaataattataaccttttaaagcataggactatagtcagcatgctagactgagaggtaaacactgatgcaattaaga

SEQ ID NO: 52 - DNA, 503 bp, Homo sapiens; identical to SEQ ID NO: 51

SEQ ID NO: 53 - DNA, 531 bp, Homo sapiens
tttttttttttttttaaaatgaggatattttattatttcaggtaattttcccagaggkgagaatagtacatgggaaattctctttaggccaggtctagtattacagkgtggkgctcaaggccgcccatcagaacagtgatactctcccaacagatttcatccaccccgtctccactaacttttgccataaaaattcctctgaattgtatcttcttggaagaagtaaatatctgttcgactatacaaagaaacagagaaaccactcccattgcaatcaatcttcaagagagggagcaggcaagccgtgttctttctgctgagttttatagactctgacaagctgtgaaataaacataaacagaagacaaaacagtgccacaaataagcagtagatgaccctgtgacaagacggcattgcagaacaaagactgacgtttaaaggggagtcatgcagagtaacatgggaacacaagcctgacaacctggtcagcttccacttactctagctcctttgaactctcaacactaaaa

SEQ ID NO: 54 - DNA, 450 bp, Homo sapiens
ccatgggtgtctggagcwccctgaaactgtatcaaagttgtacatatttccaaacatttttaaaatgaaaaggcactctcgtgttctcctcactctgtgcactttgctgttggtgtgacaaggcatttaaagatgtttctggcattttctttttatttgtaaggtggtggtaactatggttattggctagaaatcctgagttttcaactgtatatatctatagtttgtaaaaagaacaaaacaaccgagacaaacccttgatgctccttgctcggcgttgaggctgtggggaagatgccttttgggagaggctgtagctcagggcgtgcactgtgaggctggacctgttgactctgcagggggcatccatttagcttcaggttgtcttgtttctgtatatagtgacatagcattctgctgccatcttagctgtggacaaaggggggtcag

SEQ ID NO: 55 - DNA, 648 bp, Homo sapiens
caacttcaaccacaggctgctggasatgatcctcarcaagccagggctcaagtacaagcctgtctgcaaccaggtggaatgtcatccttacttcaaccagagaaaactgctggatttctgcaagtcaaaagacattgttctggttgcctatagtgctctgggatcccaccgagaagaaccatgggtggacccgaactccccggtgctcttggaggacccagtcctttgtgccttggcaaaaaagcacaagcgaaccccagccctgattgccctgcgctaccagctrcagcgtggggttgtggtcctggccaagagctacaatgagcagcgcatcagacagaacgtgcaggtgtttgaattccagttgacttcagaggagatgaaagccatagatggcctaaacagaaatgtgcgatatttgacccttgatatttttgctggcccccctaattatccattttctgatgaatattaacatggagggcattgcatgaggtctgccagaaggccctgcgtgtggatggtgacacagaggatggctctatgctggtgactggacacatcgcctctggttaaatctctcctgcttggygayttcagcaagctacagcaaagcccattggccggaaaaaatatcaagggtcaaat

SEQ ID NO: 56 - DNA, 536 bp, Homo sapiens
ctggcatgagaatatttttttttttaagtgcggtagtttttaaactgtttgtttttaaacaaactatagaactcttcattgtcagcaaagcaaagagtcactgcatcaatgaaagttcaagaacctcctgtacttaaacacgattcgcaacgttctgttattttttttgtatgtttagaatgctgaaatgtttttgaagttaaataaacagtattacatttttaaaactcttctctattataacagtcaatttctgactcacagcagtgaacaaacccccactccattgtatttggagactggcctccctataaatgtggtagcttcttttattactcagtggacctgcccgggcggccgctcgaagccgaattccagcacactggcggccgttactagtggatccgagctcggtaccaagcttggccgtaatcatggtcatagctgtttcctgtgtgaaattgttatccgctcacaattccacacaacatacgagccggaagcataaagtgtaaagcctggggtgcctaatgagt

SEQ ID NO: 57 - DNA, 391 bp, Homo sapiens
aggaactactgtcccagagctgaggcaaggggatttctcaggtcatttggagaacaagtgctttagtagtagtttaaagtagtaactgctactgtatttagtggggtggaattcagaagaaatttgaagaccagatcatgggtggtctgcatgtgaatgaacaggaatgagccggacagcctggctgtcattgctttcttcctccccatttggacccttctctgcccttacatttttgtttctccatctaccaccatccaccagtctatttatttgtctagttggatttcatttcttctggaaaatttattgtttattggcatgtgacccttgactgatggcttcattagcattytgtttttctttttggatccttaatagaaaactcaat

SEQ ID NO: 58 - DNA, 455 bp, Homo sapiens
gaagacatgcttacttccccttcaccttccttcatgatgtgggaagagtgctgcaacccagccctagccaacgccgcatgagagggagtgtgccgagggcttctgagaaggtttctctcacatctagaaagaagcgcttaagatgtggcagcccctcttcttcaagtggctcttgtcctgttgccctgggagttctcaaattgctgcagcagcctccacccagcctgaggatgacatcaatacacagaggaagaagagtcaggaaaagatgagagaagttacagactctcctgggcgaccccgagagcttaccattcctcagacttcttcacatggtgctaacagatttgttcctaaaagtaaagctctagaggccgtcaaattggcaatagaagccgggttccaccatattgattctgcacatgtttacaataatgaggagcaggttggactgg

SEQ ID NO: 59 - DNA, 398 bp, Homo sapiens
  misc_feature 264, 266: n = A,T,C or G
ctcagaggcagcgtgcgggtgtgctctttgtgaaattccaccatggcgtaccgtggccagggtcagaaagtgcagaaggttatggtgcagcccatcaacctcatcttcagatacttacaaaatagatcgcggattcaggtgtggctctatgagcaagtgaatatgcggatagaaggctgtatcattggttttgatgagtatatgaaccttgtattagatgatgcagaagagattcattctaaaacaaagtcaagaaaacaactngntcggatcatgctaaaaggagataatattactctgctacaaagtgtctccaactagaaatgatcaatgaagtgagaaattgttgagaaggatacagtttgtttttagatgtcctttgtccaatgtgaacattt

SEQ ID NO: 60 - DNA, 532 bp, Homo sapiens
gacttctgagacctggggcacccgggcctttgcggcagctactggcagggcctggccacctcataggactcagttcccttctgaacactcgggggacatgggcctctaactgcccactctgatatgcctgggtgagcctaggagggaaggctctgatttggatttctccagtcaaagctcacagaaaaaaacctggcactttgattttcatgggatggtcctaacagggtcagtcacctccgagcagtttgggaacccagtttcttgtcctgggccctcaggtcagcctggctgaattaggacccttccttggcacaggggtgagaaagagcttggggaacgcttggcattatggagggctggaaggggctcaaccccgatttggagagaagtttgggatggagtgggcgagagattgagagagcgagcaggaaaagaggtcttggagcctgggactgatggtggataaggcctggaaagaasatgacsaggaggaggagagagggaagtgggtggatgaggagcaggctga

SEQ ID NO: 61 - DNA, 466 bp, Homo sapiens
gcgacggcgacgtctcttttgactaaaagacagtgtccagtgctccagcctaggagtctacggggaccgcctcccgcgccgccaccatgcccaacttctctggcaactggaaaatcatccgatcggaaaacttcgaggaattgctcaaagtgctgggggtgaatgtgatgctgaggaagattgctgtggctgcagcgtccaagccagcagtggagatcaaacaggagggagacactttctacatcaaaacctccaccaccgtgcgcaccacagagattaacttcaaggttggggaggagtttgaggagcagactgtggatgggaggccctgtaagagcctggtgaaatgggagagtgagaataaaatggtctgtgagcagaagctcctgaagggagagggccccaagacctcgtggaccagagaactgaccaacgatggggaactgatcctgaccatgacggcgga

SEQ ID NO: 62 - DNA, 548 bp, Homo sapiens
ttttgaatttacaccaagaacttctcaataaaagaaaatcatgaatgctccacaatttcaacataccacaagagaagttaatttcttaacattgtgttctatgattatttgtaagaccttcaccaagttctgatatcttttaaagacatagttcaaaattgcttttgaaaatctgtattcttgaaaatatccttgttgtgtattaggtttttaaataccagctaaaggattacctcactgagtcatcagtaccctcctattcagctccccaagatgatgtgtttttgcttaccctaagagaggttttcttcttatttttagataattcaagtgcttagataaattatgttttctttaagtgtttatggtaaactcttttaaagaaaatttaatatgttatagctgaatctttttggtaactttaaatctttatcatagactctgtacatatgttcaaattagctgcttgcctgatgtgtgtatcatcggtgggatgacagaacaaacatatttatgatcatgaataatgtgctttgtaaaaagatttc

SEQ ID NO: 63 - DNA, 547 bp, Homo sapiens
tttccaaagcggagacttccgacttccttacaggatgaggctgggcattgcctgggacagcctatgtaaggccatgtgccccttgccctaacaactcactgcagtgctcttcatagacacatcttgcagcatttttcttaaggctatgcttcagtttttctttgtaagccatcacaagccatagtggtaggtttgccctttggtacagaaggtgagttaaagctggtggaaaaggcttattgcattgcattcagagtaacctgtgtgcatactctagaagagtagggaaaataatgcttgttacaattcgacctaatatgtgcattgtaaaataaatgccatatttcaaacaaaacacgtaatttttttacagtatgttttattaccttttgatatctgttgttgcaatgttagtgatgttttaaaatgtgatcgaaaatataatgcttctaagaaggaacagtagtggaatgaatgtctaaaagatctttatgtgtttatggtctgcagaaggatttttgtgatgaaaggggattttttgaaaaat

SEQ ID NO: 64 - DNA, 528 bp, Homo sapiens
  misc_feature 374, 443, 444, 452, 476, 489, 515, 523: n = A,T,C or G
cacctmctcccsccwggcgcttwctcsgacgccttgcccascgggccgcccgaccccctgsrccatggaccccgctcgcccsctggggmtgtygatkctgctgcttttcctgrckgaggctgcactgggcgatgctgatcargagccaacaggaaataacrcggagatctgkctcctgcccctagactackgaccctgcckggccctacttytccgytactactacgacaggyacacgcagagctgccgccwgttcctgkrckggggctgcrasggcaacrccaacwattyctacacckgkgaggmttrcgackatgctwgstggargatagaaaaagttcccaaastttgccggctgmaagtgaatgaggacnaccagggtgaggggtacacagataagtatttctttaatctaakkwccatgacatgwgaaaaattctttnncggtgggngtcaccggaccggattgagaacangtttgcagatgangctactgggatgggctcctgcrcacnaaagaaantatca

SEQ ID NO: 65 - DNA, 547 bp, Homo sapiens
  misc_feature 408: n = A,T,C or G
kgaatgaasaacgaacgctggaagtagaaatagagcctggggtgagagacggcatggagtacccctttattggagaaggtgagcctcacgtggatggggagcctggagatttacggttccgaatcaaagttgtcaagcacccaatatttgaaaggagaggagatgatttgtacacaaatgtgacagtctcattagttgagtcactggttggctttgagatggatattactcacttggatggtcacaaggtacatatttcccgggataagatcaccaggccaggagcgaagctatggaagaaaggggaagggctccccaactttgacaacaacaatatcaagggctctttgataatcacttttgatgtggattttccaaaagaacagttaacagaggaagcgagagaangtatcaaacagctactgaaacaagggtcagtgcagaaggtatacaatggactgcaaggatattgagagtgaataaaattggactttgtttaaaataaagtgaataagcgatatttattatctgcaaggttttttttgtg

SEQ ID NO: 66 - DNA, 535 bp, Homo sapiens
ggggaggtctacgcttctagagcttgagccagcggggcgaccctgcagtggcaggactcggcaccgcgccctccaccgccggttggtggcctgcgtgacagtttcctcccgtcgacatcgaaaggaagccggacgtgggcgggcagagagcttcatcgcagtaggaatggcagccccatctatgaaggaaagacaggtctgctggggggcccgggatgagtactggaagtgtttagatgagaacttagaggatgcttctcaatgcaagaagttaagaagctctttcgaatcaagttgtccccaacagtggataaaatattttgataaaagaagagactacttaaaattcaaagaaaaatttgaagcaggacaatttgagccttcagaaacaactgcaaaatcctaggctgttcataaagattgaaagtattctttctggacattgaaaaagctccactgactatggaacagtaatagtttgaatcatagtgaacatcaatacttgttccctatatacgacacttgataattaaga

SEQ ID NO: 67 - DNA, 527 bp, Homo sapiens
atttctgccacttaattcaaacagtcatatgcaggtcgcttaatttatttgtgcttttgtttcatcttctacaaggccctcttagctctaaaacttgacagtggaataaggaaatgtttttccaaatctgcattgccggtgagatcctcaacatcagcatgttgagatggacctcaaccccacctctaaccctgaaacacactactcgatattatcttaggtatgttttagggtttagtttgtaaaataataatttatttttgaaggaaatataaaatattaaagagtaataatagctatcattttttaagattcaatctaaaacaatggactctttttttttccatttgtgatgtagataagcaagacaattttgatcatgagtggtgaaaagaggatcaaacttgactattcttgcaatggcagtccagcaacaagcctttcatttacattaaattataacttttcattcattcctaaaccaaacttaaaattctgctttcctttgagtagaaggtatttaactt

SEQ ID NO: 68 - DNA, 431 bp, Homo sapiens
gggaaacttcatgggtttcctcatctgtcatgtcgatgattatatatggatacatttacaaaaataaaaagcgggaattttcccttcgcttgaatattatccctgtatattgcatgaatgagagatttcccatatttccatcagagtaataaatatacttgctttaattcttaagcataagtaaacatgatataaaaatatatgctgaattacttgtgaagaatgcatttaaagctattttaaatgtgtttttatttgtaagacattacttattaagaaattggttattatgcttactgttctaatctggtggtaaaggtattcttaagaatttgcaggtactacagattttcaaaactgaatgagagaaaattgtataaccatcctgctgwtcctttagtgcaatacaataaaactctgaaattaaaact

SEQ ID NO: 69 - DNA, 399 bp, Homo sapiens
gacacggcggacacacacaaacacagaaccacacagccagtcccaggagcccagtaatggagagccccaaaaagaagaaccagcagctgaaagtcgggatcctacacctgggcagcagacagaagaagatcaggatacagctgagatcccagtgcgcgacatggaaggtgatctgcaagagctgcatcagtcaaacaccggggataaatctggatttgggttccggcgtcaaggtgaagataatacctaaagaggaacactgtaaaatgccagaagcaggtgaagagcaaccacaagtttaaatgaagacaagctgaaacaacgcaagctggttttatattagatatttgacttaaactatctcaataaagttttgcagctttcaccaaraaaaaaaaa

SEQ ID NO: 70 - DNA, 479 bp, Homo sapiens
cgcggcggagctgtgagccggcgactcgggtccctgaggtctggattctttctccgctactgagacacggcggacacacacaaacacagaaccacacagccagtcccaggagcccagtaatggagagccccaaaaagaagaaccagcagctgaaagtcgggatcctacacctgggcagcagacagaagaagatcaggatacagctgagatcccaggtgctgggaagggaaatgcgcgacatggaaggtgatctgcaagagctgcatcagtcaaacaccggggataaatctggatttgggttccggcgtcaaggtgaagataatacctaaagaggaacactgtaaaatgccagaagcaggtgaagagcaaccacaagtttaaatgaagacaagctgaaacaacgcaagctggttttatattaggatatttgacttaaactatctcaataaagttttgcagctttcaccaaaaaaaaaaaa

SEQ ID NO: 71 - DNA, 437 bp, Homo sapiens
ctcagcggctgccaacagatcatgagccatcagctcctctggggccagctataggacaacagaactctcaccaaaggaccagacacagtgrgcaccatgggacagtgtcggtcagccaacgcagaggatgctcaggaattcagtgatgtggagagggccattgagaccctcatcaagaactttcaccagtactccgtggagggtgggaaggagacgctgaccccttctgagctacgggacctggtcacccagcagctgccccatctcatgccgagcaactgtggcctggaagagaaaattgccaacctgggcagctgcaatgactctaaactggagttcaggagtttctgggagctgattggagaagcggccaagagtgtgaagctggagaggcctgtccgggggcactgagaactccctctggaattcttgggggg

SEQ ID NO: 72 - DNA, 561 bp, Homo sapiens
ggatggtatactgtaaattcagcatatggagataccattatcataccttgccgacttgacgtacctcagaatctcatgtttggcaaatggaaatatgaaaagcccgatggctccccagtatttattgccttcagatcctctacaaagaaaagtgtgcagtacgacgatgtaccagaatacaaagacagattgaacctctcagaaaactacactttgtctatcagtaatgcaaggatcagtgatgaaaagagatttgtgtgcatgctagtaactgaggacaacgtgtttgaggcacctacaatagtcaaggtgttcaagcaaccatctaaacctgaaattgtaagcaaagcactgtttctcgaaacagagcagctaaaaaagttgggtgactgcatttcagaagacagttatccagatggcaatatcacatggtacaggaatggaaaagtgctacatccccttgaaggagcggtggtcataatttttaaaaaggaaatggacccagtgactcagctctataccatgacttccaccctggagtacaagacaaccaaggctgac

SEQ ID NO: 73 - DNA, 916 bp, Homo sapiens
ggagaaaataaggtggagtcctacttgtttaaaaaatatgtatctaagaatgttctagggcactctgggaacctataaaggcaggtatttcgggccctcctcttcaggaatcttcctgaagacatggcccagtcgaaggcccaggatggcttttgctgcggccccgtggggtaggagggacagagagacagggagagtcagcctccacattcagaggcatcacaagtaatggcacaattcttcggatgactgcagaaaatagtgttttgtagttcaacaactcaagacgaagcttatttctgaggataagctctttaaaggcaaagctttattttcatctctcatcttttgtcctccttagcacaatgtaaaaaagaatagtaatatcagaacaggaaggaggaatggcttgctggggagcccatccaggacactgggagcacatagagattcacccatgtttgttgaacttagagtcattctcatgcttttctttataattcacacatatatgcagagaagatatgttcttgttaacattgtatacaacatagccccaaatatagtaagatctatactagataatcctagatgaaatgttagagatgctatatgatacaactgtggccatgactgaggaaaggagctcacgcccagagactgggctgctctcccggaggccaaacccaagaaggtctggcaaagtcaggctcagggagactctgccctgctgcagacctcggtgtggacacacgctgcatagagctctccttgaaaacagaggggtctcaagacattctgcctacctattagcttttctttatttttttaactttttggggggaaaagtatttttgagaagtttgtcttgcaatgtatttataaatagtaaataaagtttttaccattaaaaaaa

SEQ ID NO: 74 - DNA, 547 bp, Homo sapiens
agtggcattaacttttagaatttgggctggtgagattaattttttttaatatcccagctagagatatggcctttaactgacctaaagaggtgtgttgtgatttaattttttcccgttcctttttcttcagtaaacccaacaatagtctaaccttaaaaattgagttgatgtccttataggtcactacccctaaataaacctgaagcaggtgttttctcttggacatactaaaaaatacctaaaaggaagcttagatgggctgtgacacaaaaaattcaattactgtcatctaatgccagctgttaaaagtgtggccactgagcatttgattttataggaaaaaatagtatttttgagaataacatagctgtgctattgcacatctgttggaggacatcccagatttgcttatactcagtgcctgtgatattgagtttaaggatttgaggcaggggtaattattaaacatattgcttctattcttggaaaaatagaagkgtaaaatgttaataatacaaatgtcactgtgacctcctccactgagagg

SEQ ID NO: 75 - DNA, 793 bp, Homo sapiens
tgaggaagttgcaagccaacaaaaaagttcaaggatctagaagacgattaagggaaggtcgttctcagtgaaaatccaaaaaccagaaaaaaatgtttatacaaccctaagtcaataacctgaccttagaaaattgtgagagccaagttgacttcaggaactgaaacatcagcacaaagaagcaatcatcaaataattctgaacacaaatttaatatttttttttctgaatgagaaacatgagggaaattgtggagttagcctcctgtggagttagcctcctgtggtaaaggaattgaagaaaatataacaccttacaccctttttcatcttgacattaaaagttctggctaactttggaatccattagagaaaaatccttgtcaccagattcattacaattcaaatcgaagagttgtgaactgttatcccattgaaaagaccgagccttgtatgtatgttatggatacataaaatgcacgcaagccattatctctccatgggaagctaagttataaaaataggtgcttggtgtacaaaactttttatatcaaaaggctttgcacatttctatatgagtgggtttactggtaaattatgttattttttacaactaattttgtactctcagaatgtttgtcatatgcttcttgcaatgcatattttttaatctcaaacgtttcaataaaaccatttttcagatataaagagaattacttcarattgagtaattcagaaaaactcaagatttaagttaaaaagtggtttggacttgggaacaggactttatacct

SEQ ID NO: 76 - DNA, 461 bp, Homo sapiens
accttgcactattcccctcagtccatctatcgaggtctttgcaggaagcatactgggaattgaaacgagagcctaaatgacatctaagaaaggcagtgttcaataccaggtattaggtgaggatgggattctaaggacatcagtgggaggcagggagccaccttcagacctcagcatggaagcttccaagatccagaggaagaggcaacagcactgagagtcataggtagaagaatcatcacagccctgctaaccaggcagctgatgcccctctcccctggctccctgtgtccaaatcctacaggggcatctgttggctgaactcaacctgaagccaaagagaagatgagtggagagaggcaacatttatagagctcaggtttctagggctggagagggatctggagggacacacaggagacacctggcataaccaaaaaatgattaaaaaaaaaaaaaaa

SEQ ID NO: 77 - DNA, 642 bp, Homo sapiens
ggttgcacgaaacacactggggaatggagcaaaacagtctttgaatatcgaacacgcaaggctgtgagactacctattgtagatattgcaccctatgacattggtggtcctgatcaagaatttggtgtggacgttggccctgtttgctttttataaaccaaactctatctgaaatcccaacaaaaaaaatttaactccatatgtgttcctcttgttctaatcttgtcaaccagtgcaagtgaccgacaaaattccagttatttatttccaaaatgtttggaaacagtataatttgacaaagaaaaatgatacttctctttttttgctgttccaccaaatacaattcaaatgctttttgttttatttttttaccaattccaatttcaaaatgtctcaatggtgctataataaataaacttcaacactctttatgataacaaaaaaaarawawattctttgaatcctagcccatctgcagagcaatgactgtgctcaccagtaaaagataacctttctttctgaaatagtcaaatacgaaattagaaaagccctccctattttaactacctcaactggtcagaaacacagattgtattctatgagtcccagaagatgaaaaaaattttatacgttgataaaact

SEQ ID NO: 78 - DNA, 519 bp, Homo sapiens
gcagaagaagaagcggaccttccgcaagttcacctaccgcggcgtggacctcgaccagctgctggacatgtcctacgagcagctgatgcagctgtacagtgcgcgccagcggcggcggctgaaccggggcctgcggcggaagcagcactccctgctgaagcgcctgcgcaaggccaagaaggaggcgccgcccatggagaagccggaagtggtgaagacgcacctgcgggacatgatcatcctacccgagatggtgggcagcatggtgggcgtctacaacggcaagaccttcaaccaggtggagatcaagcccgagatgatcggccactacctgggcgagttctccatcacctacaagcccgtaaagcatggccggcccggcatcggggccacccactcctcccgcttcatccctctcaagtaatggctcagctaataaaaggcgcacatgactccaaaaaaaaaaaaaaaagggcggccgccaccgcgggggagctccacttttgttccctttaatga

SEQ ID NO: 79 - DNA, 526 bp, Homo sapiens
gtctggaggcggtgtcctctccgccctgtcgggtcctggatgagtacgagttatggtcacggtcacagcctgatctcttatgtgttcatagccattcgctctcccatcagaactgtttgtcctgaatgtgttcctctagttctagaaaatgaccactaatttaaaaaactcggttgtgaggtttgcccagaggcacttgttccagaatttcccctcctgcttcagccatgtccttgtcacttggcattctaagctaaagctttagcttcccaattcgtgatgtgctaggccaagattcgggagctgttgccagcctcgtcaaatatggaagagaaacaacctgcggtcaaaagggagtgatttgttaagtggtgcgcgtctatctcataactagatgtaccaaccagggaagggccaaggatggaaaggggtaacttttgtgcttccaaagtagctaagcagaagtgggggagcagtttagccagatgatctttgattaggcaaacattgagttttaaagaggctg

SEQ ID NO: 80 - DNA, 281 bp, Homo sapiens
gttatattagtgggtagtgtaacattttatccaggttggggtgaggggagatggccacagtagcaagtggtgacactaaataccattttgaaggctgatgtgtatatacatcattactgtccgtagcaatgaaggatacagtactgtgttgtgggtgagtgttgctattgcccagcattaatatttgggtgtgtatgtttgaggctatgaaacacgcaggagtgtttttgtgctattaattttaagagaaagcagctttttcttaaaattcactgttgaga

SEQ ID NO: 81 - DNA, 405 bp, Homo sapiens
  misc_feature 219, 230, 261, 306: n = A,T,C or G
gtgggtgggagcgcgtgctgttgggagttgcttggaggttggcggcgcggggctgaaggctagcaaaccgagcgatcatgtcgcacaaacaaatttactattcggacaaatacgacsacgaggagtttgastatcgacatgtcatgctgcccaaggacatakccaasctggtccctaaaacccatctgatgtctgaatctgaatggaggaatcttggcngttcagmagantcagggatgggtccattatatgatccatganccagaacctcdcatcttgctgttccggcgscccacttaccccaanaaaccaamgaaatgaaccttggctactacttttcaatcctcaaakcttttcacavhtgaccttccttcctaacattctttmtgataaacatttattaag

SEQ ID NO: 82 - DNA, 547 bp, Homo sapiens
tagtttttaagaagaaattttttttggcctatgaaattgttaaacctggaacatgacattgttaatcatataataatgattcttaaatgctgtatggtttattatttaaatgggtaaagccatttacataatatagaaagatatgcatatatctagaaggtatgtggcatttatttggataaaattctcaattcagagaaatcatctgatgtttctatagtcactttgccagctcaaaagaaaacaataccctatgtagttgtggaagtttatgctaatattgtgtaactgatattaaacctaaatgttctgcctaccctgttggtataaagatattttgagcagactgtaaacaagaaaaaaaaaatcatgcattcttagcaaaattgcctagtatgttaatttgctcaaaatacaatgtttgattttatgcactttgtcgctattaacatcctttttttcatgtagatttcaataattgagtaattttagaagcattattttaggaatatatagtkgtcacagtaaatatcttgttttttctatg

SEQ ID NO: 83 - DNA, 529 bp, Homo sapiens
ctattctaagagatgctcttagtgatcttgcattacactttctgaataaaatgaagatcatggtgattaaggatattgaaagagaagacattgaattcatttgtaagacaattggaaccaagccagttgctcatattgaccaatttactgctgacatgctgggttctgctgagttagctgaggaggtcaatttaaatggttctggcaaactgctcaagattacaggctgtgccagccctggaaaaacagttacaattgttgttcgtggttctaacaaactggtgattgaagaagctgagcgctccattcatgatgccctatgtgttattcgttgtttagtgaagaagagggctcttattgcaggaggtggtgctccagaaatagagttggccctacgattaactgaatattcacgaacactgagtggtatggaatcctactgcgttcgtgcttttgcagatgctatggaggtcattccatctacactagctgaaaatgcccggcctgaatcccatttctacagtaacag

SEQ ID NO: 84 - DNA, 527 bp, Homo sapiens
cccatcaccagaatcccttcatgggagggatggatgcctgttgaaactcactgacctattggactgacgctggggtggtatcttcatcagagctattgtaagtcatccaaaaggcttctgacgaaagaacaatttttaaaaagtccctcttttcaatcaagccaatgtcctattttatttctaaaagttttgggactcgtgctgttatcaagtacaatgaaaatggctttataaatagctgttttgacattgtgatagaaggcttgaatacggaggaaagatgtcgctggagctagtcctgagttccgactgtccctgtggtgggaatccagtctgggaaagcaggactgttttagcaaacgtgtactcgttctataaaaatggaatctgttctgcaggttaccgtccctccccgcccaagcatcccctctgtcctgtctctctgctgctgggacccagggctttttcagctgcagaacccactggacttccaggaatcaaggaaaaagtggaaatgtccaactgtg

SEQ ID NO: 85 - DNA, 401 bp, Homo sapiens
cagtgtggtggaattcccaagatagaaatgaaaaactcttttatagagtgctgacatctgacattgagaaattcatgcctattgtttatactcccactgtgggtctggcttgccaacaatatagtttggtgtttcggaagccaagaggtctctttattactatccacgatcgagggcatattgcttcagttctcaatgcatggccagaagatgtcatcaaggccattgtggtgactgatggagagcgtattcttggcttgggagaccttggctgtaatggaatgggcatccctgtgggtaaattggctctatatacagcttgcggagggatgaatcctcaagaatgtctgcctgtcattctggatgtgggaaccgaaaatgaggagttacttaaagatcca

SEQ ID NO: 86 - DNA, 547 bp, Homo sapiens
gaagcctcttgtgtttgtgtgcagagaagtatatgatccaccatgctaatgacacttgcctttttttccaccattaaggctttaagaacatgtggaataagttttttagctgctaatgacaaaacaaatcctgtaactacccagccagcaagtatatagcacagaacactgtgttactttacaagggcttatgtgactggaataaggtggtcccacttgactgttccaaagagcagcttctcagatcttcagtgttcactggtaaatttctaacagtgtatttgtgtaaagtttgtcatttcatactccatacactacagttgctgtcactgatccctgttttgctggcttttaagctacttggtcaaaaatcctgcttccttaaaacatagagaattaatgagcatctcaagctttttcttttcctttttaatgatgcctgcactatcaagagtattctagtgttctctctttgtttggcatataatcatgcaccaaactttttatttctttaaggtgggagtatatttttatttcctaaatgcca

SEQ ID NO: 87 - DNA, 530 bp, Homo sapiens
atggattcgaaataccagkgtgtgaagctgaatgatggtcacttcatgcctgtcctgggatttggcacctatgcgcctgcagaggttcctaaaagtaaagctctagaggccgtcaaattggcaatagaagccgggttccaccatattgattctgcacatgtttacaataatgaggagcaggttggactggccatccgaagcaagattgcagatggcagtgtgaagagagaagacatattctacacttcaaagctttggagcaattcccatcgaccagagttggtccgaccagccttggaaaggtcactgaaaaatcttcaattggactatgttgacctctatcttattcattttccagtgtctgtaaagccaggtgaggaagtgatcccaaaagatgaaaatggaaaaatactatttgacacagtggatctctgtgccacrtgggaggccatggagaagtgtaaagatgcaggattggccaagtccatcggggtgtccaacttcaaccacaggctgctggagatgatcct

SEQ ID NO: 88 - DNA, 529 bp, Homo sapiens
acctgagctaagaaggataattgtcttttggtaactaggtctacaggtttacatttttctgtgttacactcaaggataaaggcaaaatcaattttgtaatttgtttagaagccagagtttatcttttctataagtttacagcctttttcttatatatacagttattgccacctttgtgaacatggcaagggacttttttacaatttttattttattttctagtaccagcctaggaattcggttagtactcatttgtattcactgtcactttttctcatgttctaattataaatgaccaaaatcaagattgctcaaaagggtaaatgatagccacagtattgctccctaaaatatgcataaagtagaaattcactgccttcccctcctgtccatgaccttgggcacagggaagttctggtgtcatagatatcccgttttgtgaggtagagctgtgcattaaacttgcacatgactggaacgaagtatgagtgcaactcaaatgtgttgaagatactgcagtcatttttgt

SEQ ID NO: 89 - DNA, 547 bp, Homo sapiens
gtttatatatatagcgaataaatctagttgtataaatttttaaatgccgtcagtagaaagcacacaaggttatgatttttttaattactggcttctgatttctttcacttctgatccttttcctttttctcagatgtagctgagtcttgatcattttaagacaacgatgggtagaattttgagattaatgttaattttccctttttgttaatttcagtcccctctcactatgcttttgtccagaaggatcaagaattctaccatcccttgggtctttgtgtataaacaatgttaaataaaggtagactcagtctttaagatattagacagtttttttagtccatgggattgtaaatataaacattaactttcctataagaatattttggctttgtaatctatagcctcaaattggtatttattatggattcactagacaaacagctgtttccttattgtcttttttctttagtgtttctgatttgctatcagtagctgtttttaaagccatccaaggaaaataattatttacagtttttgaagtcac

SEQ ID NO: 90 - DNA, 528 bp, Homo sapiens
gagcagcagaagctgtacagcaagatgatcgtggggaaccacaaggacaggagccgctcctgagcctgcctccagctggctggggccaccgtgcggggtgccaacgggctcagagctggagttgccgccgccgcccccactgctgtgtcctttccagactccagggctccccgggctgctctggatcccaggactccggctttcgccgagccgcagcgggatccctgtgcacccggcgcagcctacccttggtggtctaaacggatgctgctgggtgttgcgacccaggacgagatgccttgtttcttttacaataagttgttggaggaatgccattaaagtgaactccccacctttgcacgctgtgcgggctgagtggttggggagatgtggccatggtcttgtgctagagatggcggtacaagagtctgttatgcaagcccgtgtgccagggatgtgctgggggcggccacccgctctccaggaaaggcacagctgaggcactgtggctggcttcggcctcaacat

SEQ ID NO: 91 - DNA, 547 bp, Homo sapiens
atataccatttaatacatttacactttcttatttaagaagatattgaatgcaaaataattgacatatagaactttacaaacatatgtccaaggactctaaattgagactcttccacatgtacaatctcatcatcctgaagcctataatgaagaaaaagatctagaaactgagttgtggagctgactctaatcaaatgtgatgattggaattaraccmtttggscyttgraccttymtwrgraaaawgrmccmacctttyttaacmtgraccwccytmatctctagaagctgggatggacttactatyctkgttwatattttaaatackgaaaggtgctatgcttctgttattattccaagactggagataggcagggctaaaaaggtattattatttttcctttaatgatggtgctaaaattcttcctataaaattccttaaaaataaagatggtttaatcactaccattgtgaaaacataactgttagacttcccgtttctgaaagaaagagcatcgttccaatgcttgttcactgttcctctgtc

SEQ ID NO: 92 - DNA, 527 bp, Homo sapiens
  misc_feature 393, 502: n = A,T,C or G
gctggctagtaggggaacatgtagtagccaagcccatgcattgcagtgcacagagcaacattggggtaacaggatgggtacctgtcacggcctgtgcaaacataacatgtgtcaccacactgaaggtatggtggaacaagtggcctcaccaaggtcggaccccaatggactttttgcctcttgggagcttatgggtctatgaggacacagtagcctttcctatcagcaaactggagtggatgttgtatctgggggtggccttatgtacctgctactgttctccccacattgcccagatgcctgtataactgggaggcactgkgctctcagtttttgcgaatgtgatgagccccctggtgtttctacccttttggcaatgactatccctggagncatgtgtcaaaactgtaaagcacaatttactgctctttgcggagcacaccgctcatgctctgaattacacctgaktgtccctcctccwgktawtgaatgaggttgatcnvatcagaaadgtggkgttggcmata

SEQ ID NO: 93 - DNA, 531 bp, Homo sapiens
ggtattcatacagccttcctaaaggcaatgctttccacaggatttaagataccccagaaaggcatcctgataggcatccagcaatcattccggccaagattccttggtgtggctgaacaattacacaatgaaggtttcaagctgtttgccacggaagccacatcagactggctcaacgccaacaatgtccctgccaccccagtggcatggccgtctcaagaaggacagaatcccagcctctcttccatcagaaaattgattagagatggcagcattgacctagtgattaaccttcccaacaacaacactaaatttgtccatgataattatgtgattcggaggacagctgttgatagtggaatccctctcctcactaattttcaggtgaccaaactttttgctgaagctgtgcagaaatctcgcaaggtggactccaagagtcttttccactacaggcagtacagtgctggaaaagcagcatagagatgcagacaccccagccccattattaaatcaacctgagccacatgt

SEQ ID NO: 94 - DNA, 547 bp, Homo sapiens
  misc_feature 547: n = A,T,C or G
gttaaacatggtctgcgtgccttaagagagacgcttcctgcagaacaggacctgactacaaagaatgtttccattggaattgttggtaaagacttggagtttacaatctatgatgatgatgatgtgtctccattcctggaaggtcttgaagaaagaccacagagaaaggcacagcctgctcaacctgctgatgaacctgcagaaaaggctgatgaaccaatggaacattaagtgataagccagtctatatatgtattatcaaatatgtaagaatacaggcaccacatactgatgacaataatctatactttgaaccaaaagttgcagagtggtggaatgctatgttttaggaatcagtccagatgtgagttttttccaagcaacctcactgaaacctatataatggaatacatttttctttgaaagggtctgtataatcattttctagaaagtatgggtatctatactaatgtttttatatgaagaacataggtgtctttgtggttttaaagacaactgtgaaataaaattgtttcaccgcctggtn

SEQ ID NO: 95 - DNA, 1265 bp, Homo sapiens
gtggtcaagcagtgatttttctgggactgcagaagttcctgctgtgcccaacctttattactaactgggaaagacccagggagactgggatgggctcatgattctacatacagaactcatccaagaaaggaggaaaagctgatttttgtgaacgtcgctacttgtgcctgaactaactctcaggcacattagtcagaaaatactacctatggttactcccccaggttcctaaaagtaaagctttagaggccaccaaattggcaattgaagctggcttccgccatattgattctgctcatttatacaataatgaggagcaggttggactggccatccgaagcaagattgcagatggcagtgtgaagagagaagacatattctacacttcaaagctttggtgcaattcccatcgaccagagttggtccgaccagccttggaaaggtcactgaaaaatcttcaattggattatgttgacctctaccttattcattttccagtgtctgtaaagccaggtgaggaagtgatcccaaaagatgaaaatggaaaaatactatttgacacagtggatctctgtgccacgtgggaggccgtggagaagtgtaaagatgcaggattggccaagtccatcggggtgtccaacttcaaccgcaggcagctggagatgatcctcaacaagccagggctcaagtacaagcctgtctgcaaccaggtggaatgtcatccttacttcaaccagagaaaactgctggatttctgcaagtcaaaagacattgttctggttgcctatagtgctctgggatcccaccgagaagaaccatgggtggacccgaactccccggtgctcttggaggacccagtcctttgtgccttggcaaaaaagcacaagcgaaccccagccctgattgccctgcgctaccagctrcagcgtggggttgtggtcctggccaagagctacaatgagcagcgcatcagacagaacgtgcaggtttttgagttccagttgactgcagaggacatgaaagccatagatggcctaaacagaaatgtgcgatatttgacccttgatatttttgctggcccccctaattatccattttctgatgaatattaacatggagggcattgcatgaggtctgccagaaggccctgcgtgtggatggtgacacagaggatggctctatgctggtgactggacacatcgcctctggttaaatctctcctgcttggtgatttcagcaagctacagcaaagcccattggccaga

SEQ ID NO: 96 - DNA, 568 bp, Homo sapiens
ccagtgtggtggaattcggtttaattacaaaatttgatcacgatcatattgtagtctctcaaagtgctctagaaattgtcagtggtttacatgaagtggccatgggtgtctggagcaccctgaaactgtatcaaagttgtacatatttccaaacatttttaaaatgaaaaggcactctcgtgttctcctcactctgtgcactttgctgttggtgtgacaaggcatttaaagatgtttctggcattttctttttatttgtaaggtggtggtaactatggttattggctagaaatcctgagttttcaactgtatatatctatagtttgtaaaaagaacaaaacaaccgagacaaacccttgatgctccttgctcggcgttgaggctgtggggaagatgccttttgggagaggctgtagctcagggcgtgcactgtgaggctggacctgttgactctgcagggggcatccatttagcttcaggttgtcttgtttctgtatatagtgacatagcattctgctgccatcttagctgtggacaaaggggggtcagctggcatgagaatattttt

SEQ ID NO: 97 - DNA, 546 bp, Homo sapiens
ttgtaccgtatctgtaggcatcctgtaaataattccaaggggaaaactaaacgaggacgtgggttgtatcctgccaggttgagtggggctcacacgctagggtgagatgtcagaaagcgcttgtattttaaacaaccaaaaagaattgtaagggtggcttgctgccaggcttgcactgccgttcctgggggtgtgcatcttcgggaaaggtggtggcggggcgtccactaggtttcctgtcccctgctgctccttccgtaagaaaatgaaatattctatgcctaatactcacacgcaacatttcttgtactttgtaagtcgtttgcgagaatgcagaccacctcactaaactgtaaacggtaaagagatttttacttttggtctccgtgagtcgcatctctactaaggtttacacaggaattccacctgaagacttgtgttaaagttctacagcgcgcactgttaactgaacgtctttttcttcagcctatacgcggatccttgttttgagctctcagaatcactcagacaacattttgtaactgc

SEQ ID NO: 98 - DNA, 547 bp, Homo sapiens
tactgggtgccaagctatgtgccaggcactttacatgtattgatttaacacttaacagccactctatattattccctttttacagatgaggcaatttaagctcaaagcatttaagtagacaaccaacctagaatcacatagcaaatgacagaagccagaggcctcccaagtctctctaactccaaaccctatgcttactctactatatcacactaccttgcaataggacaaagggaatatgtggtaaactatgttcccagcatctaaaagccaggagtggttttcatttttctttaagaagatgatagtgtgatttgaaacatatctgaatttcagaagaggggacttttaaaaattgccactcataaggaaagaaagaactttttcacatatttttgaaagaaacgatggtgagaagatattcttgataatagagatatgctaacatttgctttgggtgttttgtaggttagatttttttggtgtgtactttataggcttgcatattgcttactttaaacagctgaagttctaagtaagagtgttc

SEQ ID NO: 99 - DNA, 122 bp, Homo sapiens
cagcctttctgtcatcatctccacagcccacccatcccctgagcacactaaccacctcatgcaggccccacctgccaatagtaataaagcaatgtcacttttttaaaacaaaaaaaaaaaaa

SEQ ID NO: 100 - DNA, 449 bp, Homo sapiens; identical to SEQ ID NO: 10

SEQ ID NO: 101 - DNA, 131 bp, Homo sapiens
ccatgttctctcttgactacgcatatgtgagatttgcccctccgccccgctcgtgatagccatccagatcttttacctggccctgtcttggagaatctgttttcaatctccactgattgcccccttgctgg

SEQ ID NO: 102 - DNA, 199 bp, Homo sapiens
ctgctgcgcctgatgctgggacagccccgctcccagatgtaaagaacgcgacttccacaaacctggattttttatgtacaaccctgaccgtgaccgtttgctatattcctttttctatgaaataatgtgaatgataataaaacagctttgacttgaaaaaaaaaaaaaaaaaaaaaaaaaaaaaaaaaaaaaaaaaaaa

SEQ ID NO: 103 - DNA, 321 bp, Homo sapiens
ttttttaggtttttaaactttttatttgcatattaaaaaaattgtgcattccaataattaaaatcatttgaacaaaaaaaaatggcactctgattaaactgcattacagcctgcaggacaccttgggccagcttggttttactctagatttcactgtcgtcccacccccacttctttcaccccactttttccttcaccaacatgcaaagtctttccttccctgccacccagataatatagacagatgggaaaggcaggcgcggccttcgttgtcagtagttctttgatgtgaaaggggcagcacagtcatttaaacttgat

SEQ ID NO: 104 - DNA, 309 bp, Homo sapiens
tttttttttttttttatttttttttttgcatcaaaaaactttatttccatttggcccaaggcttgttaggatagttaaaaaagctgcctattggctggagggagaggcttaggcaaaacccctattactttgcaaggggcccttcaaaagtctctgggcttctatttcaaccgcgatgatgtggctctggaaggcgtgagccactttttccgggaactggccaaggaaaagcccgagggctacaaccgtttcctgaaaatgcaaaaccagcggggcggccgcgctcttttccaggacatcaaaaagcca

SEQ ID NO: 105 - DNA, 591 bp, Homo sapiens
cttatttctgcatgggtcggagagtgggcgggactgctttactgagttatagtgaatgtagttttaacctaagcgcctcacatgactaactcctcatccatcaagaatgagctcagctctcacttccccactcctcacccccctgtaaagtaacctttctccaaggttatgcttcaacaggaatagctaacatttattaaattgtggcacgtaagtatcttggatatattggctcattgaatcctcacacctactattttacagagatgccagtggggcttgagattgaatcacttgcccaggctcccactgctggtaaacagtagagggggctcctgacccatcagtctggcttgacaacccattccctcaactgcggatcccggattcccttatcaccctgttgatttctccataggctgtggtaacatttgttgcatgaatggaccgttgaaatagggcctggcagggagaaattcaggaaatgaatgaatggttcttccctggcagcctttgatgacttacaagccccttcaagggggaaagccatttttctccctgggactccttgaaagcccgggagccctgcct

SEQ ID NO: 106 - DNA, 450 bp, Homo sapiens
ctgccactcctgcctctgctaccccgaaaccggagagggagctcaataataacacaggtcccactaaactaattaaggtgttggcataacctgtcattgaattcaagtgtccaacaactgtttgcttaaaatatcattagacctaatatttttttcaaaggcacaaagtttaaacatggggggggcgggtgttgagaggggtctgggatacccttaaacccaaaaaagtgatttgttcccccttgcccagaagggtgactgttccactgggcctgtcaccacaggacattttccatgacaagcactcaccttcttggggaaggggcatcaggttggcacaggaaaggcccaagtgaggggccactctgtacattaatactttggtgattaatgtttggggagaggcaggattctcacccacctttttgacttcaaacactctcactcaag

SEQ ID NO: 107 - DNA, 116 bp, Homo sapiens
tcgacgaaagttactgtcactcagttgtaaatccatcagcttttcacctgttaaaaattttgcaaaatatacatgttctcctcctgttttcaattcttccatcttttttcttgagg

SEQ ID NO: 108 - DNA, 291 bp, Homo sapiens
ctgctcgaagttgtcaaaacccacgtgcagggcaatggagagtccgatggccgaccacagcgagtagcgtcctcccacccaatcccagaactcgaacatgttttgagggtcaattccaaactccttcactttggttgtgttagtagacagggcaacaaagtgcttcgccactgcagtaggatccttggccgcctggagaaaccactccttcgccgtctctgcattcgtgatggtctcctgggtagtaaaggtcttggaggcaatgatgaacagggaggactcggggttcag

SEQ ID NO: 109 - DNA, 662 bp, Homo sapiens
gctgtttccacagtacgcctgcctcacaccttgcgatgcgccaacatcaccatcattgagcaccagaagtgtgagaacgcctaccccggcaacatcacagacaccatggtgtgtgccagcgtgcaggaagggggcaaggactcctgccagggtgactccgggggccctctggtctgtaaccagtctcttcaaggcattatctcctggggccaggatccgtgtgcgatcacccgaaagcctggtgtctacacgaaagtctgcaaatatgtggactggatccaggagacgatgaagaacaattagactggacccacccaccacagcccatcaccctccatttccacttggtgtttggttcctgttcactctgttaataagaaaccctaagccaagaccctctacgaacattctttgggcctcctggactacaggagatgctgtcacttaataatcaacctggggttcgaaatcagtgagacctggattcaaattctgccttgaaatattgtgactctgggaatgacaacacctggtttgttctctgttgtatccccagccccaaaagacagctcctggaccttgccccggggcggcccgctcggaaagggggcgaaatttcttcaagaatatttccatttccacaaacttggggccgggggccc

SEQ ID NO: 110 - DNA, 323 bp, Homo sapiens
tcctgtgaaacagcccattttcctacctactgtgggttgctgctcaggaggaacgatatacgccaatacaagcaggaaatctgcagctcctctgctatgtgcctcagaacactttcaatttttctggtcaatgctctgattaggtatcatacataaaagccagcatattagtttaaatctctaacaaaaaactatattttccaaagtcattatcatttgggccaattaagtgatcttttcgtgctttgttgagcttcatctttagggcatctcttctttcttcccattcatgaagttcggcatttccatgtgcaaatttacag

SEQ ID NO: 111 - DNA, 336 bp, Homo sapiens
tccagtgcgctccagccttatctaggaaaggaggagtgggtgtagccgtgcagcaagattggggcctcccccatcccagcttctccaccatcccagcaagtcaggatatcagacagtcctcccctgaccctcccccttgtagatatcaattcctaaacagagccaaatactctatatctatagtcacagccctgtacagcatttttcataagttatatagtaaatggtctgcatgatttgtgcttctagtgctctcatttggaaatgaggcaggcttcttctatgaaatgtaaagaaagaaaccactttgtatattttgtaataccacctctgtgg

SEQ ID NO: 112 - DNA, 218 bp, Homo sapiens
tttttttttttttttttttttccagtcaggagtatttttaatcactgtctacagagacacctacatacacacacgggtggggaatgaacccaaagtttttaggtgaagtctctcagggcccaccccgtgccacagaccttcctcggttgcagagattctgggcaaagcatccgtgctctcatgagattatcctggggagatttagaagaattttgtgg

SEQ ID NO: 113 - DNA, 533 bp, Homo sapiens
ctgcaccgacagttgcgatgaaagttctaatctcttccctcctcctgttgctgccactaatgctgatgtccatggtctctagcagcctgaatccaggggtcgccagaggccacagggaccgaggccaggcttctaggagatggctccagaaaggcggccaagaatgtgagtgcaaagattggttcctgagagccccgagaagaaaattcatgacagtgtctgggctgccaaagaagcagtgcccctgtgatcatttcaagggcaatgtgaagaaaacaagacaccaaaggcaccacagaaagccaaacaagcatcccagagcctgccagcaatttctcaaacaatgtcagctaagaagctttgctctgcctttgtaggagctctgagcgcccactcttccaattaaacattctcagccaagaagacagtgagcacacctaccagacactcttcttctcccacctcactctcccactgtacccacccctaaatcattccagtgctctcaaaaagcatgtttttcaagatctaaa

SEQ ID NO: 114 - DNA, 261 bp, Homo sapiens
  misc_feature 43: n = A,T,C or G
ccatatctgctcggcgctacttctttcttggattgatcctgantgatgcattggcgatgcctttggagaaggacatgtgatgtgatggtcttcacgttccacatgtactcgggcaaatagggggacaaactgaagttaaacaggtcgaaactagaggagctgctgaccctggagctgaccactttcttggggaaaaggacacatgaaggtgctttgcaaaagctgatgagcaatctggacaccaacataggacaacaacgt

SEQ ID NO: 115 - DNA, 267 bp, Homo sapiens
cctctcctgtgggttccagaccctgttccagcaacaattgctgggacacctgggccgactgctccacctcgccaggccctggccctctccatctcagccctgacagccacccagtgataaacacagcaggcttcctaagcaatgtgacgcaccagaggggtggtggtacacgttccccttgaagtcatctgaaaattagagaacagatttgcctcatagctgaagagagaccctattccaagcatgaatggccttgacaatgttcct

SEQ ID NO: 116 - DNA, 239 bp, Homo sapiens
ctgatgacctggggtctagtgaaaatgcagggtcagattcagtgggtctggggtctgaatctctaaggcgctgccaagtgatgctgatgctcctggcttgtggaccaccctgtgtatagcaaagctctagactaggaggtctcaaccttggctgcacagaattatctggggagtttttaaatttcccagtgcccaggctgcattcatatcatagtagagacagggttttgccatgctgg

SEQ ID NO: 117 - DNA, 168 bp, Homo sapiens
aaaaaacttttatattgctgcatcttccacagttctttgggtagtctctgaacttaaaatttgtaggagttgtagactacctaaatttttaagttatggatttgttcataggttgtaggggtaggtaaagaaggaaacagacaagaaaatggcttcttgaggtggcag

SEQ ID NO: 118 - DNA, 150 bp, Homo sapiens
aaaaaaaagagtttatttagaaagtatcatagtgtaaacaaacaaattgtaccactttgattttcttggaatacaagactcgtgatgcaaagctgaagtgtgtgtacaagactcttgacagttgtgcttctctaggaggttgggtttttt

SEQ ID NO: 119 - DNA, 154 bp, Homo sapiens
aaactgtgtgagatattaaccagccgccctgttataaaatcaggaaatccaaacagcgatttacaccgattaacacccccttttatattttttcaaatacactgagaaaataatcaaacgttttcatctctcttgtctttttttgttttttcct

SEQ ID NO: 120 - DNA, 314 bp, Homo sapiens
ctgcgtggagtgacgggaggagggaatcactgtgtgtgcgagagtgcttcagactcaatttccaaaataattttcacccctctaagcatgtaaattcaaagatggatccttcatagaaattaaaaaatcaatttgagctcatttcgaatacagaacaagtatggcacagatggaagtcctgccacgtttcctttaatgatgctgactcttgtatcacacaggccagcatgaagtttcttactcagactttacaggcattttccgtaattcaatcagtcctgctcccagcacaacacaggaggtgattcgagaat

SEQ ID NO: 121 - DNA, 601 bp, Homo sapiens
aaaaaaaacctaattcattgaagtaataaccaaataattttcaatcttgattcaactgtgattcaaatcttacaccatttgccccttctatgaatttatgtataaaattttttaagagtcagagtttttttttcttgattaattggatgtatttcacagaatttccaactgctcacgttagttttcttccttttagagttgatctctctaatgtattagatcttcatgcctttgatagtctctctggaataagtttgcagaaaaaacttcagcatgtgccaggaacacaacctcaccttgatcagagtattgtacaatcacatttgacgtaccaggaaatgcaaaggaagaacatcttaatatgtttattcagaatcttctgtgggaaaagaatgtgagaaacaaggacaatcactgcatggaggtcataaggctgaagggattggtgtcaatcaacgacaaatcacaacaagtgattgtccagggtgtccatgagctctgtgatctggaggagactccagtgagctggaaggatgacactgagagaacaaatcgattggtcctcattggcagaaatttagataaggatatccttaaacag

SEQ ID NO: 122 - DNA, 486 bp, Homo sapiens
ctgtttctaattgcttttgtgactgttaccttttagttcatgcccccccaaagagctaaatttcacatttttacctacaaaattgatttttaattcctgcaaataatttaccattatgagctacaaggtgggcaacagcgcctgaggatctaattttatgcatattactcccaagtattttaacacttgttggagaagcaatatctggatcaataaaacactgtcccatcaaccatttgagtggggagagggagaagctcttctgtaagtaagattctggcaagctctttgaaatgagtcttctttcccacagattttctctactctttcaatacaaacagataggagaagagggaatagaaacctggaggaacttgaatatttttgttctagatagagatacagttattgaaaaggaaacctagaaagtagtcacacgtcgcttatttaggccagaagtaattgtactgggcaaaaatttcactt

SEQ ID NO: 123 - DNA, 239 bp, Homo sapiens
ctggtgggtctttttttcctctcagagctcaagcctgtagtgcctgatgtcatttctttcaagttgcccacagtatctccacttaaactaggctagtaaccaaaataatgtggaccttctttaggaaacagtgtgggagaataggagtccagccgtaagataaactggaaatatttgggcgtcttgtacctggctacgcaccacctcagtgttgttcctacataaacaaggcccctttt

SEQ ID NO: 124 - DNA, 610 bp, Homo sapiens
  misc_feature 4, 12, 30, 73, 75: n = A,T,C or G
ccanccaagtcnttgatgatcactgacccncgcgcgcctgctggaccaaggtggctgcggggaaatcgccacngngctttcggttttcttggtgaaggaatacaccgcgccgacagcaggttttcagtcagggtcagggactgttgcttgcgcgcgaaaatcaccggtacgccgaggttcaggccggtcatgatcgccggtgcaatgcccgaggcttcgatggtgacgatcttggtgatgcccgaatccttgaacaacgcagcgaattcatcaccgatcagtttcatcagcgccgggtcgatctggtggttcagaaaggcgtcgaccttgagtacctgatcggaaagcacgatgccttcttcgcgaattttcttgtgcagtgcttccacgaaagcttcctctgttggcgcaacacgcgccgaaagtagattaaaaagtagtcgattctagcgctttaacatcgcgcgtatatccgccagggcggtattgccgcgaacggctttgacttcggttggtgtgtcgtcgttgccttcccatgccaggtcatccggcggcagttcgtcaaggaaccggctgggggcacaatcaatgatctcgccgtactgcttgc

SEQ ID NO: 125 - DNA, 196 bp, Homo sapiens
ctatagggctcgagcggccgcccgggcaggtaaaaaatcagcccctaatttctccatgtttacacttcaatctgcaggcttcttaaagtgacagtatccttaacctgccaccagtgtccaccctccggcccccgtcttgtaaaaaggggaggagaattagccaaacactgtaagcttttaagaagaacaaagtttt

SEQ ID NO: 126 - DNA, 247 bp, Homo sapiens
aaattagttaaaaaaatgcattcctcatttgatatagccacattccaaatgcttaaaagccgcatgtatctagtgactaccatactggagagtacaaatatagaactttacccgtcactgcagacagttctgttggattgtgcagcattggacaatatatacagtttgcctgtatatgagaaagagagagagagagagagtgtgtgtgtgtgtgtgtgtgtgaagtgcaataaggctgacaggcatc

SEQ ID NO: 127 - DNA, 590 bp, Homo sapiens
cctccacggcatggcgcaattgttgttcaggggccgccaggttgctgcccatgccgatgtagatacgttccacgtgcttactcgccagacgcactcgaagcgtcgccagcgctacgtttgcgcttgctgccactgctgcggcgacgctttttcgggccatcgccggtggcttcgcctttgctgctgagctctttgatcatctcgcggcgctggctgtcgttggcgtcctggtagtcggtccaccactcgccaaggccgtcggtctgttcgccggcgctttcacgcagcagcaggaagtcatagcccggcacggaagcgcgggttgtccagcaacaggtcggcacgtttgccgctgcggcgtggcaggcgctcctgcatgtcccagatttcacggatcggcatggtgaagcgtttcgggatggcgatgcgctggcattgctcggcgatcagctcgtgagcagcttcctgcatggctggaattgccggcatgccacggtcttgcaggcgcatgacgcgtttcgaaagcgcgggccacaacagggcggcaaagaggaacgccggggtgaccggtttgttctgcttgatgcgca

SEQ ID NO: 128 - DNA, 361 bp, Homo sapiens
ctgcccatggaaaccctccaggagctgctggacctgcacaggaccagtgagagggaggccattgaagtcttcatgaaaaactctttcaaggatgtaaccaaagtttccagaaagaattggagactctactagatgcaaaacagaatgacatttgtaaacggaacctggaagcatcctcggattattgctcggctttacttaaggatatttttggtcccctagaagaagcagtgaagcagggaatttattctaagccaggaggccataatctcttcattcagaaaacagaagaactgaaggcaaagtactatcgggagcctcggaaaggaatacaggctgaagaagttctgcagaaatattt

SEQ ID NO: 129 - DNA, 546 bp, Homo sapiens
aaaaatacaaattcagtaagacttttgctctaacaacaatttttcaaaacgaatcaacaacaaaaaagtatccagtgtttcttttcttatgaagatataataaaacacagtattggtaagcacattttaacagtatgcttttcttttgtagggaaaggagatatggctatgtctaacatcgtgggatccaatgtgtttgatatgttgtgccttggtattccatggtttattaaaactgcatttataaatggatcagctcctgcagaagtaaacagcagaggactaacttacataaccatctctctcaacatttcaattatttttctttttttagcagttcacttcaatggctggaaactagacagaaagttgggaatagtctgcctattatcatacttggggcttgctacattatcagttctatatgaacttggaattattggaaataataaaataaggggctgtggaggttgatattattaatagtgttatgcagaaaatatgaatggcagggaggggcagagagaaaaatccatttcttcattt

SEQ ID NO: 130 - DNA, 733 bp, Homo sapiens
  misc_feature 611, 631, 668, 689: n = A,T,C or G
ggggcctcttcctaaaggcactaatcccatccaatagggcttaacctcatgacttaatcaactttcaaagacaccacatcctaatgccatcacatcagaatttaggcttcaacatatgaattttggggggacacaaacattcacctcatagcattcattgtttcttgttattggcaaagccaagactcacattgtctaagttatttgacttttgagtccgcagatgtgaaaacagtgctaaacagtccagcttcatgagtggagaacagcatttgtgacaaccaccaaagtacctctgtggtcagtgtcctcaaccagggcacagcatcatggaccagagcctctgcagggcacagaggagtggtgaggaacaggggctctggagcaaccccacttccctctgctttgtatatggggggttctgcacatgactgcatttgaaaagggcttcactgcgcttgctgaaggagtgcacttgagctagcggagagttcccagagggtgtctggaagaagcaaaggctattctttgtttcactcagttatagatggaagtcagacacttctgcctgaagtactttcacacactccacagtcttaagaaggatgganaaagcatgccaactactcanaaaaccacaggtgttcaagcaatggtatccttttatncctacaactagtggacaaagnggggcctctgtaatttgggaaagctaggaaaactttttctgggg

SEQ ID NO: 131 - DNA, 305 bp, Homo sapiens
  misc_feature 16, 19: n = A,T,C or G
aaacacatacgaatanttnaactgtgattatgaagtgacagccggctaaatatgtcttgtattttctctcttcctttttttgctaactcatcctttattccattcctgcttccatggtaatgcaggctcaaataaattactaggatacaagattacttcaagcctcttttctgtggaactcataatatgataagcatttgttacaagattgcctgtagttgtttaggggacaaattatattagggaaagaaagtctttctttagttggttaaattttctattataattgggtactaaatttattt

SEQ ID NO: 132 - DNA, 545 bp, Homo sapiens
aaacaatgctacactcatttttggcaaagtgctgtattgttcagtctgtgtacaaaactgaccatctatgaaccaatcagtataaaaaatttctataaaaacaaaatttagacagcggctcaagaaaacaagctgccatttatgcatagattgatgtacagtaacctaaccaaatgtcccttttgaattttcaagttactgaaaaaaaatgtgtcgagaaacacattaagaaggcacatgtacagtctacaatactcttcagtctccctaactcatgccctgcccctataaaggaaatatgttcacaattttacttgagaaaaaaaaacaaagccacttaaaaaaaaaaaaacacacacgcaattattaaagttcaaaatctctggaggaaaatacaagcaaaaccactcatacactccaagcctgaaacacacatctaacctccccaggtactggtttggttttcagaggtccacctagaaaacaaatctaaaacttcaggcaaaacagagcaaaactggacatttaacaattacacaattttt

SEQ ID NO: 133 - DNA, 330 bp, Homo sapiens
  misc_feature 36, 68: n = A,T,C or G
aatatttattactaatatcttataatgttttgtggnaccatggcataccttgggtactattgtaacanatagttcaggaaaccctactataaggtttatcaaatggtctcataaacagttacttattcaagcacgccaaagctcagtgaaaagtatttttcacccttactctttctcgtgtcattcaaagagaagttttgatgtagtgtatttatttgtagggagtaatgaacagatccatttcacagtagactttgtgctctaggtgatgcagctaattgccccagtttggaaaacatggacttggatgaattgtcttttgtttgggac

SEQ ID NO: 134 - DNA, 627 bp, Homo sapiens
  misc_feature 99: n = A,T,C or G
aaatattacttcaaatacattttaaagctcaacaaacttgtgttgaactgaattgcagatcctgaactctatttgaaaatacatcatgaaacagaaaancccattccaaatgaaaatgatagtgctttgttgggggtgggaatgaggcggggagactaaatcactattaacagacttcttttcccaatgcaatttgtcaaaagttcaaaagttctgaaatgtactaaatcttaagcaaattaaattcatgatattactaaaactttttaaatagtgcaatgacttatcaagttatagtggctgcattaagaacaaattattgtgtgaaatacctgtataaacacaaaatacaattaaatatttctttacaaaaagctgagcattacgcataatagtggaatgtctttcattaggtgtattttttaaagattaacaaaagtaacatttcctaaaatgtatacatgtgccatatttttgcaaacatgcctgagaatgtatttaaaacatttctgtagtaagagtttgcaagaacttcacaaacctgcaaataaaatgcatctttttaaaaaggtgaaaatggcatctccacactgcaacaattcaaaaagtgcagcatccctaatcttt

SEQ ID NO: 135 - DNA, 277 bp, Homo sapiens
  misc_feature 45: n = A,T,C or G
aaaatcaaatatattatttgttaaaaatcagcttgtttcattacnggaaattacaccagtccgttctatttactttcaaaccatattcaactcctcaactttcaaacatgtaatcaactaatttcaaaagggaaaaggtaccctttataaaggagagatctgttaagacaccaagaaatcaaaattaatatcacttaataattaagtggataacacatgcctcccaatacagtgcagtgagaaacacaaaacatcaattcccgcgtactctgcgttg

SEQ ID NO: 136 - DNA, 486 bp, Homo sapiens
aaaacagaatgaattcattgttacagttacagaagtcagaagcccaaatacagtctgcctgaaccaaagccagggtcagcaaggttcctttccactgttttgccaacttctagaggccacctgtattccttggttcatggcccctctcttcatcatcaaataatcagcatagctttatgacattggcagctctgattttgctcttttgccttcctcttatgtagacccttgtaattacattgggtacacccagataaccccaaataatctccctatctcaagattcttaatgtaattatattgggaaagtcccttttgtcatataagataacatagcaatggattccaaggattagtatgtgagtttcttttgaggggctataattaaccctaccacaatatggaaatgtctattgtttttctatgtaccagaaataagacattaggatgtgaaattaataacataacaccacttacggcatcacc

SEQ ID NO: 137 - DNA, 552 bp, Homo sapiens
  misc_feature 310: n = A,T,C or G
ccatcttgcatcaaatgttcttaaggcagtgactggctatcaaccacagtttctgtctccccagttgcaaacacaggatccatgcaacagttctgagaccatacacttagaaaccacaggggatgcggatcaaatgcagaactcccaaattataaaacagtcaggctacactcaaaacaaaacatagaacatcaacaacacacatctcccaaaaaagaagtgcaacgcatgcttgtataaaccaacaataacaaaaaaaccacaataaaaaatgcagagtctcccaaacaagttttcaaatgtattgcanaaagaaaaaaaatgtatatatatataaaattaaaaagtctgaaatactagtgcatagtcaattacctaacaccaagtttcttttctttctgtccaagctctactgcccctctgatactagcagcatgtctacaggctaagaccatagcagcaaaaaacgtttttcatttggcatttacaaaattaaattactgaataaaaatataattttttataaaactatttcttacagtaataattttt

SEQ ID NO: 138 - DNA, 231 bp, Homo sapiens
aaattttactagtgttacttaatgtatattctaaaaagagaatgcagtaactaatgccctaaatgtttgatctctgtttgtcattactttttcaaaatatttttttctgtaaagtataatatataaaacttcttgcttaaattgaatttctatattagtggttaattgcagtttattaaagggatcattatcagtaatttcatagcaactgttctagtgttttgtgttttt

SEQ ID NO: 139 - DNA, 535 bp, Homo sapiens
cagttgccaaccctctgaaccgtttaggccggttcatcgctgcctttgaatctgggccggtggtgatccggcaaggggtgaaaccaaagagcgggggctgtgaggcccttcgcagtccctcgtaagtcgctgcgatggagtgaactatcacgcatcgtgtttatttcgtcaacacgaaatgtgatttatttttgcgaattaacacggcagttctcggttacgttttcggaaagcgtgggatatgattctgtctatcctgtacggatatacagtaattaccgggaggggattccatggcgaagaagcaggcggcaccggcagcacggcaggaaatgagcggtatggcgcgcctcgggcttcgcgtctcatcgatgattaatcacccggtcgcccagacgcagcgctgggttacgattcatcgcctggacacggatggggatcgggagtgggaagaggttctgagcgtgatcgctgataccgacgagctcgagctgacgctcaatgacgatggcagtgtgacggtgaggtgggagca

SEQ ID NO: 140 - DNA, 640 bp, Homo sapiens
  misc_feature 557, 559, 591, 599: n = A,T,C or G
acattggtggcacttgaactgagtgcaaaccacaacattcttcagattgtggatgtgtgtcatgacgtagaaaaggatgaaaaacttattcgtctaatggaagagatcatgagtgagaaggagaataaaaccattgtttttgtggaaaccaaaagaagatgtgatgagcttaccagaaaaatgaggagagatgggtggcctgccatgggtatccatggtgacaagagtcaacaagagcgtgactgggttctaaatgaattcaaacatggaaaagctcctattctgattgctacagatgtggcctccagagggctaggttagtacaaactcgcattcatggcttggtttcccagaagatctccatttaacttttttaaagaaagtttattgctttctttaacctgcattttttctaagttttttttcgcataaaggtgctgtctttgtggcaaggcctaggcatgacaatcggaggactcgagggggatggaggactagtgatccggctggctgcttccagtcgattagagaggtgaaaaagctgaacgtgtgcccantnaatcttcaaaaaggcagaaacatatcaccttntgcccccntaaacttgttctttttccgaaggggaaaaaaaaaatggaaa

SEQ ID NO: 141 - DNA, 127 bp, Homo sapiens
aaaaatcacacactgacaacacagaaatacgaaatgctaggaaaagtctagcatatgaaggaaaaacatgtcttatgcactctaatataattttttcaattagtataaaggcaaatgcggttttttt

SEQ ID NO: 142 - DNA, 126 bp, Homo sapiens
  misc_feature 18, 44, 46: n = A,T,C or G
aaatatcctctggatgcnttcaagtaatactaatcatttcatgngnaaaagtcttttaataaacaaattcagagtaaaattaattgaaatatttataatacatttgttacacagttatttccaata

SEQ ID NO: 143 - DNA, 730 bp, Homo sapiens
  misc_feature 512, 555, 603, 608, 685, 721: n = A,T,C or G
gcaagttctggagtgttcacttctgagcctgaattccctcccctgcaaaatgggggaataccctcctcagagggtccctgcgagggtgaggggagatcagcatggcaggtgtgctgggcacggcagggcctgggaagggcagatcctttccccatccctgccacaaacaacccaaacctttaaaggagagcaatggccttgtgtcaaaaacaaaaacaaaacaaaaccctgtcctaggagactggggccctaatttctaatagcaagcctttatgagtccctaacactctactgggctgagtatctcacacgccagaggataacctgccttctgctcaccaccaccccgtagtagttgtcattgtgtccatttcacagatgaggcaaaggctcagaagagtcatgtgttaaaccagcttctagagcccatgcaggagctgcaggtggggagaatcacctctaggtgctcttcccatggaatcctcaccctccttgagtggtcactcactcanctttccaatgggtgtgtgacctttgaccagctttctttccttntctgggcctcagtttcccaccttggacaaagtaagaggtctcttgggnttcanggtagttcttcctaacttcttttccttttcatttgagcatccttcttcattttttgccacctctcttgtcattacangcttttaccttcggccgcgaaccacgcttaagggcnaaatttcca

SEQ ID NO: 144 - DNA, 485 bp, Homo sapiens
ctggtcagaaatgattctcttgtgacaccatcgccacaacaggctcgggtctgtcctccccatatgttacctgaagatggagctacctttcctctgtgtggcattttgtcgcttatccagtcttctactcgtagggcataccagcagatcttggatgtgctggatgaaaatcacctgtgttgcgtggtgggtctgctgccgccacttctaatcctcatcatgacaacgtcaggtatggcatttcaaatatagatacaaccattgaaggaacgtcagatgacctgactgttgtagatgcagcttcactaagacgacagataatcaaactaaatagacgtctgcaacttctggaagaggagaacaaagaacgtgctaaaagagaaatggtcatgtattcaattactgtagctttctggctgcttaatagctggctctggtttcgccgctagaggtaacatcagccctcaaaaatattgtctcaacag

SEQ ID NO: 145 - DNA, 465 bp, Homo sapiens
ccaagacagctcgtttctggagagtatgagggtgtgttttcttattgtgaaaggaactaccttctcttagagggtaggaagaatgtggtgtgtgtgtgtctcataaagcaaccggacattataggtgcccaggtcatctataaaaacgatccttgggctgtgtaaaaatgaagtggcttttcagtatcctctttcacacttgctgcttcgggagactatgcaatgatgggaaggtgattgcccctttatttcattcagtgccatggtccctgttgttgtagtaatttatttgtttagttcattttttttttcttaacagtcaaggggaagagtgattcctcacactgctttcaagctggactgagccagtctcattctgggaaagaaatgctgtgtccagaactcagcagctccatctattttttccagtcgaaagaaactgatctttaggcagtttttacttgg

SEQ ID NO: 146 - DNA, 351 bp, Homo sapiens
ccagccggggtaatctgtatgtggcggacttgagctacgacgtgggcggcaagtgcctgtttgaccagatcagcggcgtgaagcttatgccaactcatcgtttgataaatccgaggatcagttcaagacgtcgcagcgggtgattttgggaacgtcgttttcggtcagtaaattgtgggtagcgacggagtggttgatcggcaagaatgatccgtatattggcgggagcagctataccgagagcctgggggctggggggagtaaccagtgggagaatcagttatatatgaacattgggtactacttctgacttaagatctccagcgttttaactggccttatcgcaggcaa

SEQ ID NO: 147 - DNA, 654 bp, Homo sapiens
acttatttttaattactgaatatttcttagacgttttgggacagattttatgtaatctttataagtatgatttctgaagaaaagcaaatgcattagtatgtttgccttaaacttgtagactaaaccaagtattgtaaaataaacagcgataacagtgatagtttttaactctatggtcattgtatcactctggaaaatgtggagtagctgtaataaatctactcctgtattatgctttacagtgcaggtcttagtttttcttttttctcatttcttttgaaatggcatctcgaacaaagtccaccaatccctttacaaaagaatgaactgctcctctgtgtgtacttcatagaaggtggaatcggacagaggcaggttagtgacagttattcctgaaatacaggagcagagtacagtctgttgtggtttcccggattccgcgcctagctcagccaattaagcatgagacataggccattgagccacttagtagttatgcgagtggatagattggtatgtaagagggaaagaggtctgctgtaaagaacaacacttgtttgtctgtggggaaagaaaagcagaatcttgagatgaaagttggcatacaaataggatactatcgccagtaggttatattacaaaacatttatcggg

SEQ ID NO: 148 - DNA, 539 bp, Homo sapiens
tgaatatcatgagggtgattttcacctgattgcaaaactgccatagtttgaaacactttttcaatttaccagacacactctgtcaagacttcatatacttccaacttgcaagcctgtgttttgccttctccaacctaaaaaggaaaagctttaaacgatgaacttacattctattaaaccatcagacttgagcttatccatctgtttagcgtgaatgtacaaaccaggtacatttccaccaaacacatagaaaaatcttgtgcatcacagttcagctaagggtagtaggacaatccttacaatcctccttggatttcttttttaagatgtcaaagaagcaggtaagcaacattgttcatttgttactgggtgttctagatcaaaccttcacaagctatatatatagcttcatatgctatagcttacaaatggggtaacaaagtaaaagaaaagaacaaattatactttgacactttatagtcaaagtataattaaaaaagaaatcctacagtgggtaatggagaaatagataatttttc

SEQ ID NO: 149 - DNA, 273 bp, Homo sapiens
tttttggtcattctcctcaaggagccgctggatagtagtcttgattgacttccaccttgcccctcatacagtccggtactaaggccaccgacatcccgaggaacctccggaaccacgaccgccaagcaactcgacccacgataggtggggcctacgctctcgaagttgattggatgctcccgcctacagggcggggtacagaagggacgtcatttgtgactggacgcgcaagagctatactcagcagctttcctctgtcccagcccctagaac

SEQ ID NO: 150 - DNA, 200 bp, Homo sapiens
gtttttactaccgtatggcccatttaaaagggatgtgtacgccttacactataacccttaaaccacctagaaatatgaaactcaaactgccactgacctccctcaccaagctccataaaagtaaaaaattataacaaaccttattaaccaaactgaacgaacatatgggcgattgattcattgcccccacaatcctaggg

SEQ ID NO: 151 - DNA, 515 bp, Homo sapiens
ctgtagcgatctttaagaatattttatatatgaaatctggatttagggttcccatggtctggcaccactgggtacagtagttctacatggcagtaattcattggagttgaagcagtgaggaaagagtcaagtactagtcttttatcctcagtgtccagtgactgtcaagagaaatgggactgccttctgcattgggatatgtgggttaaagagtagtccaatatagaagagtgagaaagtgmaccctctgaggcatagtaatgttttattkraaaacatctcacatgtattgaatacttasataggatgtattctgtattactgaattttccagattattgaagcaatcacctttctgtgtttaaagttttagaaagaatgcttttaaaaatgcttaacataagataagcctgttttcatggtgcaaggtcctttctatgaacatgaatcactggactctgagggttggactaagatcacatctacatcccttttaaatgactagtgtgctcaga

SEQ ID NO: 152 - DNA, 243 bp, Homo sapiens
atttcaacaacatacttgtcgaggtagttataaatcttcttagggggaggtggtggtttctgttggaatgccaattttacagcttctgctgctgattcaggttctttaattatgcttttctttgagtctgcttcagatagcacaacaaaaaaatgatgacacttttcacacttgacaaaacgggtggatgatacaaaaggtctctacatgtgtgcacaagtcgccacatttaggacagcgcag

SEQ ID NO: 153 - DNA, 620 bp, Homo sapiens
ttgtcttctctaccttaccatagccagttgctttcattttaaaccagagcaagtaacatattagtgacttgaatcttcataagttaaagtaaaaaacagcaaaaaacctagatctttgtcttttagaacacagaccattttcaggaaagcagttagctaagtgtttaattcatgaatattgtatactgcatcccctaccacaatttacacaatcctgtggatagtcctacctcaccctggtcaacctacatgatccttaagctaatggcggatcacgatgaccttgtagacatgcacacaactatacctttgtccaacagatcataatatatctgctatccaactggttttacctgcctaatcctactgatttgggcactgcttgtatagtctctcaagttcacaggaaatgttgattttctaaggtcctcatttttacagagtatacaggcaaagtgacaggggaaaaggaattagtctaagagtaaggggatgattattatattgaggctaaaaccacaaagtggctcaggctttaaaaaaaaacactgtggataatgacaaaaagcataagtaaaaatattttgagaaaaataaagtacaagttttgaacacccccc

SEQ ID NO: 154 - DNA, 843 bp, Homo sapiens
cattgttagtgacccaagtaaatttatagtttttaagttcagaggaaaaataaagcctattttttgttaacagtcttaataaataataaaatggaataaagaaaccaaaaaaaaaagaaaaagtttgtatgaaaattcatccctatttctttattttggactaagtagtcaaatttctactatattaatattatgtaagcgacacccatttaaattcactctctttgatagaaaggtgagttgattatcacacctgctattttttcactgccaaaragactgcaataacctccctccatcaccctcaaaaaacaaacagaaaccatctgaggcatagccattgtttacatattgtgtttgtgtgcacctatctacaacgttctttcttctaaggagtttatctgccaatattttcggcttcagcagcagcgctcttcttgacagactaagagaaggatctacagaaaagtcatctgattaaggttttgggtcaaattaaaactctctggacagaatcctctttccttcacttggatttctgcaaacagaaagcagattattctcctggcacaatagcgactctagaaacgcttatgtttttcagactttggcagaacttgttaagaacagcatcatcataatacatttgtacaaactcgaatttcagtggctcttttgtcccacatgatgcatgatgaaatttataaaggtctgttttacccccacagggtcatttcttttgtgttcctacagagccaataggcttcatttaagtccaagttattatattaaccatccctttcactagactagagaacttctttttcatggtccatatcgtga

SEQ ID NO: 155 - DNA, 674 bp, Homo sapiens
tttcgtgtcagccccaggtttgctccagctattcacaagcagaatataacacaagaaaaacaattcatatcccttagggaaaaaagaggatcaattcatcactcaatatttaatacagccaaaatgagctgccaaaacaagcacacacacaaatactgtgaacagaaaaatacaagaaaatgactaagctgggagtcttgacggggtatggacattgcttaaagcacttatcagtccccagaaaaaccaaaccaaaaacattttttacgatggcatggcctcatggccccctttaaaactgttgatggtaacaaagggcagggggtggggagagaaaacacaatcactgctccctttttgctcgccagtgtgactgcacccctcacggcaccggcatgtacacaactaccacacaaggaggaccaagtccctctgctggtggcctcctaaaaggcaaggcttgagttttggctgatgagcaagttctctccgttaccaatccctgccaaccagcactaccatggctgaattgatctaccgttttcctgagtaaactgtaactggctacagtttcggtaacatggaaaagaactcagctactacagccaactgcaatacttcaggaaccccctccatccctggggctcctcactcctagtgcatcttgattggat

SEQ ID NO: 156 - DNA, 671 bp, Homo sapiens
cctttagtgaacacctttatctccatgtccctcttagagcccagagagctgcccataggcattttccagaattcctcatgtcacctagttcaatttccattaactcagatcagccattgtgattcaccatttgtcaggctctcaggtttaacaaaacctactatcaccatcatccttcaacagccacagtctgaattgagccaacatttttttttctttgagaaagaagtgggctggggcacaacttttagtctgaggggagctagtagtcggcttgacaattaaagccatccataacaacttttcctcaaatgtgttgactcctcaggggctaaactgctcttagcttagaattatgctttactagagatctaccatataagtgggttaatcactaccatcctgtaactagttatatagcttccagacatgagggagacatcaaacagggatggaagcaaccccaaggatatgcaagaagggcatgatgaacccccttccctctggcaggagaacaaggccaaccaagggacagactggaaagcacttagatgtttaaggaggagaaaggggaagctttgaccagtccttgccttttgccaagttcagccagttctccgctgcttgcaacctctagcgcagtaacattttgcagaattgcagattttccc

SEQ ID NO: 157 - DNA, 474 bp, Homo sapiens
cgcgttctttaattctttaagcctagaaagtcctttacactacttacctaaaggtcccaaagtaaaacacacactagtagtaaggctagtgcatttcccttctagcactcaaagaaagcttaacatttttgacagtttgcaaataccgccttgtatttctgattcagccttattcaaagtatcataataaaatatttattaaatstatgttgatctgcgtgcatttatgatctccagattaacgttaggcttctctgttgggccctaacttggaggtgcttttttggatccctcctcccgtgattcattgtaatttcatttcccttgtcatggctctgaccagagaagattctaaatatctgcccccaaagccaaaattatatcttttgaaaagtgaaatgaagagttgagtcastaatttattttagatattactgcctaaaacaattccccaaaatttatggaagttggagg

SEQ ID NO: 158 - DNA, 584 bp, Homo sapiens
ttggattctgcagttccacatcattcactccggcaaaggagagaacttgtaacaaagatgagtgccaagtttagtcaatttaccctacctggaatactatatacaactctgggtctcatgtgtgttaaaatacatacagtgaagctgaggaagagccactgaagtaaaaagtattgtttacaagttggaaaggatgtaaaaataatctaaagtatactaagtcaggaataaaaggcagagttaataaaattgtggctggtactgatagacgaaacagatatattttctaaatcctggaataattattaaaaaattttacatgtatcaatggattccagactccatattttaagtttcacaactactgtcatttaaaactataccttattgaacgtctcccactctcaataaattaccccaaatcactcttctccaaaacgtaaatttggaacacactgacttacaaattttgggcttaatttataggatgttgtggccctcaaaaatatcattgtgggctaaacaaaataaattcttgaaacaattctaaaaatcaatcattgtccaaaatgaactttttctaa

SEQ ID NO: 159 - DNA, 671 bp, Homo sapiens
cctaattttattacttttcttgccactgctattattgatagaaatacaattaaataattaagatgaaccaatccattggaagattactaaaattgtatcttcccaatgcctcctacagtaagatttctttataattataacccttggagacaatttgaactttatttaaatgttctgctcaaatctaaatttccttctcctaggctgaagcctgatctaaataaggaagtagttgggatatatccacaggctgtcgaacatggagctgcatctgagagacaggtggcagcaaccaaaagcaaagcagggactgagaacaggcaggttccaagagcaaaatggaacttgaaagccaagtatggttcactgtaaaggagaaaatatagaaatacggaactagaacacctggtctgggatgtggtaagcacccaaaatataggaaaactgtatgaattcttgtgaagcagtaaactatgatagtaatcatgtgacacatatgataacaaactcaaaacagggaaaagaggggctttattcaatgctggagataagtgaaaaaaaaagtgaagtgtctcaaggacagaagttatcatctcaaaaaggcatatcagctagatctcgcggaaaccatatgattatcataattctagactctgttcggtattacaaag

SEQ ID NO: 160 - DNA, 315 bp, Homo sapiens
ccagagagggagggctctgcttcaccacagggcaccagaagaggactggtgcgcgggaagaccaggtaatcataatgctattaaaaatagcagtaatcatactgttttatacattgtataatgtcataaggattttaactttcatgtaacataattgctgtaaaagtttccccagtttgttttgtgctatttaccctggtgttaaaatgtgtaagaatttacattttaggtatgttaggtttattcctttttatatggtttctgtttgaaattttgattttagaagacattcattctcaaggtcataaaacacac

SEQ ID NO: 161 - DNA, 607 bp, Homo sapiens
tttytgtgtcaccttggataattgcttaacttttaaaatttacgttccctcatttccaaaaagggattataactcactgttattttgataattgagataaatgtacgtacaagtgctttgaaactgtaaagtgcattataaacagagggatttaccatagaggttctaccttgatgtatcaagagaagccttttctggaatctggtgcagccttgtgagatgctgttaggtaaggggactccttggtagaatttcttacatttgtgtaaaaagttctggttcctgagtaattccaaagaagatgctatgaggagttcactgtgcctttgatttgatcccaatgggtcagaatatgttttctcattcagtaggctactacaggatttgaagtagaaaaaacagggtccagtgaccttcacgggatcctagatgttcatgaatttcaatcatttgagattgtggggtgtggtccaatgctgctctcaaaaagatgttgcctttcttcasagagcattaataactaaaaaatcccctggtcccaaatttattgtgtgtmtctgaaggctttaactgaagaaatgaaawgcacactcatggaacaaactaa

SEQ ID NO: 162 - DNA, 443 bp, Homo sapiens
tgagttttgaaaaagtgaataatcaaaaggaaaataattccttgttgttcataaattaagcatcactaaagtctcttgaaaggcatttctgtattgggcaagatttaaaatactaaagccttaggtcctattcatatttaaagtagcatgtttgtaacctgttactatttggagagagaagcagttgcctgccacaattgaagactacctttcaaatagcaaaagagagagagaaggctgatatttcgggcttttaaataaagatttgtgtggttctgcttttactgtaactgtcactttcccagtgaaaatgatttcatatacatttgagggtcttacasgtatgggtaaagttctataaattgcaacaaaatgatacccaatttcattttatcctttttgtattgtgaaactggaaactttatgacattgtaaattatcag

SEQ ID NO: 163 - DNA, 686 bp, Homo sapiens
caggcaaattatagtcaaatacatcacccccctcaggcatctgtggcaaggcatccctctagagaacaactaattgattacttgatgctgaaagtggcccaccagcctccatatacacagccccattgttctcctagacaaggccatgaactggcaaaacaagagattcgagtgagggttgaaaaggatcccagaacttggatttagcatatcaggtggtgtcgggggtagaggaaacccattcagacctgatgatgatgtaagttagctttgtatattcttgaaacacctataaagttttatttaccgattgaatacttaaatgtaagtgaaaatctaatagatgtttatgtaaatctaggtagacatcacctggattccccactctattgcttacctttttgttttgtaatttgatcagttcaagttaaaacaatttaaccaaaaactatgaatgtttatgatataatgaaatgattgttaactttcttattgctttttcacacacctataaaagtaattttattactcccaagagaaatcactaaaggcagaattactagaggtaaaaataactagggttggtacagtattactcaggagaagtcaaggggagaaaacttgtcccaatgattcaaaataattttggcatggggggggggagggaaaaaaatttggcttccttt

SEQ ID NO: 164 - DNA, 706 bp, Homo sapiens
ttttttttgtttcatttgctgcttaaaataaaaattataaattagatttaaatggagcactaattataaaacagattgcaagtaccaccatttgaaaaaaaaaaaaaaaatcagtggatttccataacacagaaaatgcatggacatgcatctacagtagagttaaaaatttcctgtgactaaaaaattaaaaactggaatcaccagtagcaaatgtatagtcaatggctatgacaagaacagatcctgccgagctcataaatgcaattattggcttttttgctttataaaaaagacattacatattttattgcattattctcctaataaaaaacatactaccacgtagctctccccatccccattctttgcttccagatttttatagaaaataactgttttagtctggccttggaaagtgaacccaccagcaccaccttcacctactcactcttcaattcaatatgcacatagcaaaagccaacacttcaaatctcttgcccacatcaaaaaaagtagtttcaggagaaaaacattaataccagttgaataaaaataagggcataaaagctatgagagagatagctctgccatctgtctctgggctaaaaatcaaggctaactattgcctttggcaccacaaggttcaaggtccatggttttattagaaaagtccccacaaaaaaattaaacccccctcacccca

SEQ ID NO: 165 - DNA, 427 bp, Homo sapiens
tyywgggcaattaggcaggagaaggaaataaagggtattcaattaggaaaagaggaagtcaaattgtccctgtttgcagacgacatgattgtatatctagaaaaccccattgtctcagcccaaaatctccttaagctgataagcaacttcagcaamgtctcaggatacaaaatcaatgtacaaaaatcacaagcattcttatacaccaataacagacaaacagagagccaaaatcatgagtgaactcccattcacaactgcttcaaagagaataaaatacctaggaatccaacttacaagggatgtgaaggacctcttcaaggagaactacaaaccactgctcaaggaaataaaagaggatacaaacaaatggaagaacattccatgctcatgggtaggaagaatcaatatggtgaaaatggaaaaa

SEQ ID NO: 166 - DNA, 124 bp, Homo sapiens
accatgttttcgttgtgtgtgagcagggaagggaactttcctgccttatttaaacctgggccgaggattcgtggaatctgcttgatcagagactctgaggccaaaaacgcatcatacttcttgg

SEQ ID NO: 167 - DNA, 232 bp, Homo sapiens
tctgcatagcaaatatgatttaagaatttaacatcattatttgatcacaagcgtaaatatgtcaccataaataaatgtaaattcattgtacaaaaattcccaacaactcttaatacaaatatggtacatttgacagtttctgaaacagattatttttaaaactttttaaaacctaagctttatttttttcctggttattagacacacacaaaaaaaataaaaagaggctggg

SEQ ID NO: 168 - DNA, 677 bp, Homo sapiens
tttcacaattaaccaacatgcaaaaattctcagactaaacactgagaaattcttcatacaatgcatttgccaccttattgcatttttaaaatctttattctatagtgaattggtattcccaatctgcctaagcaaaggcatgcccttctaacaagatttgcttagagcagaggtgatagaaggaagaatccgaagaccctctggcatggcaatctgggagcagcacattgttgatggagtccaagtgagcacatttcacacaattcatttagtgacaagtgggcttgctcccttttcatccaggaaaaaaactactcacagaccactgcccagaatctggaataagaaccctcattttaaggtattcttcccaacaaataaatatctaaatattgaaagggggcatatcagaaaacttaaaagacacaataaccaaaaccaaaaccctcttcaaaacaagtaagcaatgtctgtatttagttcactctaaaacattcttagcttttcttgcagtttgttcctaaaagatttgattgggcacaagaggaacgaaattattaataaaataaaagcttatttttgtttttgctgtggataatcggtacaaaacgtttccagatctgagacttaaatggatcttttaaggtgaaaaggagaatgccaggttctactgaaat

SEQ ID NO: 169 - DNA, 635 bp, Homo sapiens
ttaagaagactgggcatttatactctctcttgctagtcagcctggagcaagcttggagcagacgcacatttttgtactggcacatattcttagacgaccaattatagtttatggagtaaaatattacaagagtttccggggagaaactttaggatatactcggtttcaaggtgtttatctgcctttgttgtgggaacagagtttttgttggaaaagtccgattgctctgggttatacgaggggccacttctctgctttggttgccatggaaaatgatggctatggcaaccgaggtgctggtgctaatctcaataccgatgatgatgtcaccatcacatttttgcctctggttgacagtgaaaggaagctactccatgtgcacttcctttctgctcaggagctaggtaatgaggaacagcaagaaaaactgctcagggagtggctggactgctgtgtgacggaggggggagttctggttgccatgcagaaagagttctcggcgggcgaaatcaccccctggtcactcacatggtacaaaaatggctttgacccgctaccgacagatccggccgggtacatccctgtctgatggagaggaagatgaggatgatgaagatgaatgaaaaaaaaaaaaa

SEQ ID NO: 170 - DNA, 533 bp, Homo sapiens
ctgtgatctcacaagtgtgaaaaatcttatgaatgtaaaatgtgtggagattcttctttgtttttagcttccactttgggaacatgtcaaagcacacattgagaagtcccatgagtgaaagagatgttggaaagcccttgaacttggtcgttaggaaacatccacactgaagaggaacctgactgtatggaaggtcaaaaaggctgtattaatttacatgcaaaaagtcacactagaggaatgccatatcagaatgcttttggtaaatatacatgttttaaagaggttatatatcattaataaaaatatctagctggtctgaagaccctgagttatctcaattgttcacggttacagatggaactctttattattgaggagttccactctttcccccatttgtcactactacacttccctagtctttaaaacaattttaggctgggtgcagtggctcattcctgtaatcccagcactttgaaaggccgaagcgagtggatcatttgaggtcaggagttcgagaccagcctgga

SEQ ID NO: 171 - DNA, 568 bp, Homo sapiens
cccttgscaaactttcccttaagtattgcactacaagtctaagacacttttcactcaaagttccttccttccttacctctcttttaacttggagtcagactttcatcagtctgacaacttctccctgtctccttccttttccccccttcacaagcatttcacctaacaaatttcttatgtgcttaatcccctcttagaagcagatgccaagatgggattaagcacataagaggtcctggactaatacaatgacaaaggctccccttgaagcatcacactaaaaggaaaaaaaaaaaaaaaacctagccattttacattaactatttctaaaatatagtatttgcttccctatttgctaaaacaaaatatactaaacatgactattccaaaaatctgtagggtactaagaatatgaagagattcactctacttcaggggatggagttgtagtagaaaaggctttgtggagggagggtggtgtttgaaatgtactttaaaagccatcctcaaagcctcgagggctatacctggcctggtgattatccaaggacagtccattcaaacaggg

SEQ ID NO: 172 - DNA, 167 bp, Homo sapiens
ccatttacaggaatcagccacttcagttcagacagctttattaaaccgcctggagcgaattttcgaagcatgttttccttccatacttgtccctgatgctgaagaggaagttacttccctgaggcacttgctggaaacaagcactttgccaataaaaacgagagagg

SEQ ID NO: 173 - DNA, 391 bp, Homo sapiens
cctcccaaagtgctgggattacaggcatgamccmccmcgccctgatgatagacacgtttttaacttctaaaaatatatgatcatgattgtgtctgtggagacttgcacatatactaaattttaamcaattagagatatttgttcattaccacattttgggagtcattatttcctctatgaagagagaaaggaatttgatacaagttcacaggggcttccagtagattgagacttttatttctagctgagctgctgatgtatgaattttttttgktattatgactttcatatgtattaaaaataaaatgaaaaaacaagggattaggtgaggaacctatacgtctctaatatgcaaaataccacagaaataatgactgktgggaaaattagg

SEQ ID NO: 174 - DNA, 474 bp, Homo sapiens
gaactcagagagaggattgtcacccttggcatctgagctgacactataaggacaatgaggagtctccttggggatagatggggagatggaaggacgatgcctgtcctacggggtcttggaaggttagggatacacactgtgagctgccacaggctcaacagtacggatagggggtgctggaaccagccagggctctgatcaccaagctatgtgccccatgcagaggaaggggtagtggcacactgaaccacccagccacaaggctatctccccatacagggcacctttaaaaaaattatccttacaggggaagacggggaggaaggatgaactgtgtgcggtgatgttgcagtgagtgtgagtttgtgtccgtccgcttgtatgagggcctaccttttactaactagcccccaactttcattatctcccctttttctgtctacccttctgcctttttaaagtggcttgcaatcc

SEQ ID NO: 175 - DNA, 655 bp, Homo sapiens
ccttgcaggggtggggatgtgtgggcttgttcactgttacagcccatgtatacctgaagggcaacatgtacccacaaatgttccaggaggtaaataaaaaatacaattcagcctcttctaaaccatccttgttgatatctctgctacttccgaaagttaattcgttatttggactccataatttttcctattaattcaccctatgtccaactccaacagtgaaaaaaatttatttaatctttgcaataagcctataggcaggcagcattatcctcagtctgcagataagctaaggctcagagaagcttgtatactgtcacttaggtagtaattgcaagagctggcattcagacccagactgtgggactcctcactccattctctttccccccactaggctgctccttaaaatacaatggatgcttgatgaacgcttgtgggaatcctgggtggacacagttccttttcggccaaaagcaccttgacgacttgtgaagaattaatctggaaaacttaacctatttataaaaacgtgttattaagggcaggttattcccaccccctttaccaaagaaacccgccctgacctttttttactgggggttggtcttgggcattttcaacaaggggggaacagtttaaaaattcccccctt

SEQ ID NO: 176 - DNA, 660 bp, Homo sapiens
cctggtcaaagtgggcattaccattcaagcattactagacatcaccgtaacgaaggctctgttcacatgaaactaccccttctccattgggggctcagactctgctctcatccaggatcctgaactctgctccaggcacctgttcaaccctctctcccacccactgcctgtcacttcactgactccagttacattgaaacaattttcagtctaagggaggattttctacctttcagagctgacctccgactttaagacttgacaggtatttatcttgaaaccagagagggagctggaggaaaaaaaaactgagcaagcacatcaatgccttttccacccttcttcatcctttccacactcaccgactgccattaccaaaacgccaagcacaaccggtttggaacaagacgcattccgttttaattaaaaccaactcattatgtattttagtgggggggaaggggggcacaatcagggttttcaccaccaaattttccacacggtttctgaacaccattgccttttaaaaaactatttttccacctccaaaatatttatttaaattttatttattacggaggtggtattcttcctttgggagccaaattgggaaatttagggaaccttttttattacccggttttttgggcgggtaaaccc

SEQ ID NO: 177 - DNA, 459 bp, Homo sapiens
ctttttctcttcctctgtggaatggtgaaagagagatgccgtgktttgaagagtaagatgatgaaatgawtttttaattcaagaamcattcagaamcataggaattaaaacttagagaaatgatctaatttccctgttcacacaaactttactctttaatctgatgattggatattttattttagtgaaacatcatcttgttagctaactttaaaaaatggatgtagaatgattaaaggttggtatgatttttttttaatgtatcagyttgaacctagaatattgaattaaaatgctgkctcagtattttaaaagcaaaaaagggaatggaggaaaattgcatcttagaccatttttatatgcagtgtacaatttgctgggctagaaatgagataaagattatttatttttgktcatgycttgkacttttctattaaaatcattttacgaaaaaaaaaa

SEQ ID NO: 178 - DNA, 720 bp, Homo sapiens
ctgcaagctcccactccttccatttatcttaacgcccaggctgacttctaagctgcttttcactttcctacctccactgcattttcgcccctgataatttttgtaagcttacctaagcctcccttcttttgagatccccttcttaaaagggtccattctattaaccctaccccatatccagttacttttactacctgctgatctatcgctaccttgtccaattcatgggaattacagggtgcactgggacaagagtaaaatgatccaacaaacataatgttgcatttaaaaaaataagctaaaagatactgatgactttttataactacaacatattcgtttgtgaataagaacatatatagtaaaaagatgaaaatgtgaacaggttgactatttcctaaatttatggcagaaggttgttctggagaggatgggaagaaaaaatgaaggctggcagtgatgggtggggaaatgcaacctccaaaattatctatctatatatttttattaaaaacacccacagtaattatggcaaatgttaatggtttgtttgttctaaggttttggatacatttaagatctcttgctttctgggtaccatttcttttcttttcttttctttttttttcaaattaattccaaaagacttatatctgctacatgaagaacgaagcaagttcagctctcttggctgaaatgttcaaatgcttgagggcaagg

SEQ ID NO: 179 - DNA, 427 bp, Homo sapiens
ctgtgaatctgtctggttctgaacttattttttagttattggcaatctttgtattactatttcaatctcttcctggtttaatctaggagggttgtatatttccaggaatttatccatctcttgtaagttttctagtttatgcacataaacgtgttcatagtagccttgaataatcttttgtatttctgtgatatcagttgtaatatctcccatttcatttctaattgagcttatttgaaacttctctcttcttggttaatcttgctaatggtctatcagttttatttatcttttcaaagaaccagctttttgtttcatttatcttttgtattgtttttgtttgtctcaatttcatttagttctgctctgatcttcgttatttcttttcttctcctgggtttgggtttagattgttcttggtttctct

SEQ ID NO: 180 - DNA, 728 bp, Homo sapiens
caaacacaaaagtcactgtgtgtgtgatgcttctccaattccactcatcctggctgccattcatgcactagtgcatgtatgcatttttacattttttaaattacaaaaatcaacctattataactgcttagatatatatgaagtaaaaatgaaagttctccctttacatgacccatcccccatcatttccctctttatcttatactgtcagcattcccagcttgtagcacagtgtctggcaatagtaaatcctcaaaaaatgatcaatgaataatttaataatgattaataaataaattaatgatgatggtgaagataaattttagcatttattgaacgctaactacaaaccagggagtgtggtaaatattttataaaaatcaatgaatgagctaaaatgccattctattatttttttggatacggtttaatattttactcataaatatgcttaaagaatattataattatatgacttagaatggtaaaacaatatgtacagcagtatcctattttttagaataaaaatataaatatgtgctcacatatgtggttggggcatgcctagaaacccgattagaacgggattttttcttaccaccattttttttacctgggaaaaatatgggaaaattttatttcccttctttttggttctaaaatttatatacaggagcctatttggctttggataaatcattttaaaaaaggtggtttaaaaaaaaaaa

SEQ ID NO: 181 - DNA, 546 bp, Homo sapiens
acaatcctttggaagacactactgggctttgggtgctgctttttaataattgagttattttgagcttgccaagtaggatctattgcctggactaaaatttatttcctaatcttctgatgaccaagaaaggaaaaattaagtttgcagatgggagatgaaatatagccagcgaatatgcatactggttctgaatgaaaggaattaacttttcagtcaagaaacagtctgcatgccgtaaattgaatttttcctgcaactggaatgattggttaattctttttgaacactggcctttctccccaagaacactaatgaattgctaatattttttaaagaaaactggttttttaattaggtaagctccacttcctcttattttttaatccctaaagaaaactgttaaaagggaatggatctatcacgccttttcttttaaaaccacctttttaaaaaaggatttttccaacccccaatttgctcttattttaaaattttgaacgccaaaagaagggaaataaaaatttttcccttaattttaccccctta

SEQ ID NO: 182 - DNA, 333 bp, Homo sapiens
ggccactctgactgggtctgctaattcacatgctctttgtgacatacggctctaagaggcagaggctggaagagaagtatgtgggttgtgggatcaagatacccaagtttcagtcttgacactgctattacttagtcaggtgaccactgtaacttcatcttgattgagcctcagatgtctcacctgcaaaatggagtttgaaatttgctatggttgggtgtcacacggattaaatgaaataatgcctgttaagcgcctatccagcacttaataagatggccactgcatcataatgctttgggcacaagtaacacaacatccaacccaaagggg

SEQ ID NO: 183 - DNA, 393 bp, Homo sapiens
ctgaatttcttgggctttatgtggcagtgtggtaaaaatatatgatcagatttcactgttaagaaaattctttcagcaatacatgtagagtcaagtttcttgcatggataactgaacatgtgggttatgagattttaaaaaatgtctcgtgacaaactttacggaaatgcaacaatctggacatctagttttgtctgagagtggcgtggatatgaagaactgtgctgttggtgctgatgccacactaagttttggcagtcacactcttggttcttcatatttgaggagatgggatggtgaggaggcctgttggctttattttattacgtgccaccatctagaatacagattcttggatatttcatcttcacaaaggtgaagctgcaaactcag

SEQ ID NO: 184 - DNA, 700 bp, Homo sapiens
  misc_feature 74, 503, 629, 656: n = A,T,C or G
ccaggscawtgaggaaaagrgaaagaatwtarrggstwttcaaataggaaaaraggaagtccaaattggtcccntgttkgccagataaccatgattgkgkatttagaaamccccatgwtytcagcccaaaatctccttaagctgattaagcamcttcagtaaaktctcaggataaaaaatcaatgtgcaaaawtcacaagcrttcctatmcgamcaatamcagmcaaacagagccaawtcatgagtgractcttattcacaattgctagtaagagaagaaaatmcctaggaatacaacttmcaagggatgtgaaggwtctcttcaaagaagaactacaarccrctgctcaaggaaataagagaggmcmcaagtaaatgggaaaagcattctatgctcatggataggaagaatcaatcccgtgaaaatggkgatactgcccaaaataatttatagattcaatgctatccccatcaagctaccattgactttcttcmcggaattnggaaaaatctactttacacttyatagggraccaaaaaagaagcccwtgtagccaagacaatcctaggcaaaaaagaccaamcctggaggcatcacagtmcytgacttcmaactatwctaccaaggnytmcrgkgmccaaaacagcacggkacntggtmccaaaccrgacwtwtwgaccmmcagacacagaacmgagg

SEQ ID NO: 185 - DNA, 192 bp, Homo sapiens
ccagyctttcttttaagtaagcgctttttcaagctcattgtagctacaaagtcaataaattggtctttgttatttttacctgaaaaggctgttaaaggttaaaatgacaaactcaaattcaaagggattggaggatttggtgtttatgatttctcagaacaacaatctagagaccaccagggtgggtttcag

SEQ ID NO: 186 - DNA, 688 bp, Homo sapiens
gtgctggaattcgcccttagcgtggtcgcggccgaggtgggatatttcttctggatagatttcagataggtagttccctcaaataagattatatgggtttgcattttcaaggcagagttgtatacttcctgctctttatttaaataaaaaaacttgaaaatctgttctgcccagtattgtaagcgctcaggtacaaatatgaatgaaacaatctctgcctaagtaacacaagtatagggacaagattctcagtaaaattctcacgtgaaatttgtaactcactagacactatcaggagatcaataattatgtaattaaaaaaaataattacctgccaaactgggttcttctttggcacttctgcttggttttaagacaattctcacatagaagcttattattccccattagtcattccatagatgtaaaactggtagaaacaggacttgaattgaacattctttacaagtaagttatatagcttctgaaaaaagggcttgaaaaagcatttttggggactataagaaccttcaaatgctttcccctcttaacaaaccttaaaattattttgaaaataatttaagggggctgattttctcttgtcaaaatcttgaaccccacttaccaggtggttggtcaaaccaaagttcaaaaaaaagcttctggcctttcctttatcccacttgca

SEQ ID NO: 187 - DNA, 779 bp, Homo sapiens
gcaaaaaacagatacattttcagtgtttaaaaatgaacaagtatggaaaggcttatacagtaactgaaaagtctcctttgggaagccaaggtgggaggattgcttgaggtcaggagttcaagaccagcccaagcaacatggcgagaccccatctctacaaaaaattaaaaaatcagccaggcatggcggacatacttgtagtagtaactacatgggaggctgaggcgggaggatcacttgagtccgagagtttgaggctgcagtgagccgcaacgcgccctgtactccagcctgggcaacagagcaagatgctgctctaaaagaaattttcttttaaagaaaaaagtctccctcatagcctgttctacaaaagtcctatttcttcccacaaaaagcctctggtacctggtgttagttcttggggtggaagattacttttaaaaatagaactattttttaagtatatcttttagggaactttagttcccgaagctttaggaaatgggatcttgaaaacaaaagggatttcaatacctatgacaatgcttaaagaattattggggcatttatttttcaatggagggtccacaaatctttggaaacccttggccaattaccagaagccactttaatttttgaccgaaaatgtttttaaaaattggcttttggaaaaactgtctctttccccaaaaatgaaaaccttgaaaaaaaggggaatttttaaggttgccccctcattaaattttaacccctctgaaagaaaaccctcttgtgacagg

SEQ ID NO: 188 - DNA, 394 bp, Homo sapiens
  misc_feature 307: n = A,T,C or G
ggcgamgtctggycaccatcatgccctttaatcaactcacacctgtttaaagagtgtttctgatttgaccttcatcccttagtttactggcgttaaaaaaagtctcagcaattttcattatttctcgtgggtctcattatcaaacctttacttatttcggcatatttcctctgggcttcttctagtttctgccttacaagcaatgctgttctgtaaatttattgaaacctctggaacatttcacctttagagatggaggatggaaggattggyaccagaagagggctaagatacgttytctgtcttngagctgaaagcacagyctactctccttcgttttgycgatgagaaaagttgaggccagaagggaggtgacatgtttagagtcacccag

SEQ ID NO: 189 - DNA, 681 bp, Homo sapiens
aagttctgactttggtctataaaacagggttattggctgtggctgcactcaatatctaaaaagttattaggaagtgcctcgttattgtcattaaagatatctaaatatggtagaccaaaggttgttgagaaacacatattatggactgagttctgtttcttctgctgtggcgcacctaagctcaagccttccttctctccctccccttctggccggcatggtatctgagctcacagacagacaaggcatgttagaatcatcagatcatgagcaccgtgctgggatttagccctctccaaagtcaattcttacagtccatactttgcttaaatcctcagttgttgaggtctgctctgctgtcagtaatcccagctataaatttcccccaaatgtggggcctagataaagtagaaggtggatggactcagcttattttcatgggatgacaggaactggaaagagaaagggcattgaaaataaaaagttattccagaatagcattaaccctcttactgttcaagaattaagaaagcctacttagaaatgagggccttgagaatgatacccaaatattggtctttctaccaaaaaatggcctttccaaatatctgctttcctgttccccaattggctttttaagtagaattaagttacctaaaactttacctgaagggtggtttt

SEQ ID NO: 190 - DNA, 839 bp, Homo sapiens
caaatacatgatttccattggcatagactcttctatagtctctcaggcacaccttatgactaataagaacactgtcttctagatataagccaagttttaggagttatctttgtagtttctgtgttgagactatgggtcttccctgtgcaaagacttgattagcaaatactatttgaaacgatcccaaattcatagtgcagttgaccacccttctgatcaaggggatctctgtatatcccatgaaagcttcataggtctcaccctagattaagtgcttcacttctcaagacagtgaacagatggaagacttttgtagttatcattatacaactgtgccctgtgtgttttattatacaaccagagaactgaggcactggctttacctgtcagctacgccaggggtgtgacgtcatctttctgacttgatcacacatgccacattgcttaatatttcaagcttagactgaaataatcctgtggtaaaaaatttttggggggctggggaggtaaagaacaagggggggaactttggaatatttttattcattaatcatatttcccgaattgtattttattttgaaatgaccataagggacttaaatacgtattgtggttaaattaaatggacccaaatggaggtaagtaaacctaatgggacaaatgaataaaaggtttatgactgggagcatttacccatgaacctccttagaagctatttaacctttcttttggaaagccctgaaggctgggaacttaaattttaaagacagtacctatttccagaatcgcttccaaatggccatgttttaaagggccaacattttgggatggccctgccc

SEQ ID NO: 191 - DNA, 697 bp, Homo sapiens
ccatcctgaatactgattttctaatggaactctattcaatggcgattgtaaaaccctgaggctccgttactattatggagcatactttcatctcattctcggctattgggcaatatgtatctcataagattttatcacatttcacagatgaactgttaattgattccatgggtacgattaggcgagatccaagctggagctgcagctctgagtcccataaattctttgtgcttctgtaaagaataaatctgtttttaatgcaaattaaaactactggcagggaattttggctcccagttattaaaagactggaaatgtgtaagtggagaaaggcaataactgcagtaatctcttaccggactctattataattccaaacatacataatggtgagaaaaaccgggaagggaagaatgtggcaatgtccactctttgccccaaacataacccttaatttccatggcgggcccaaacactggtaaaaaccaaaatggtaccctctatagcatgcaacttttatttcactccaaacgaaaaattattttgactatggcttgggaaatccattagtagaagaagttttataacctataggaacccggccatttcatttctaccaaatcacaggaattttagaatgggcaaggaatttacaggaagacttgcccaattatctttttttgggggactaaaccaa

SEQ ID NO: 192 - DNA, 687 bp, Homo sapiens
ctggttactatagctttgtagtataatttaaagtcaggtaatgtgattcttccagttttgttatttctgcttaggatagctttggctattctggatcgtttgtggttccatataaattttaggatagttttttgctatttctgtgaagagtgtcattggtactttgatagggattgcattgaatctgaagattgctttgggtagtatgaacattttaacaatattgattcttccgattaatgaacatggaatgtttttcctttatttggcgctctctttaatttccttcatcagtggtttataggtttcattatagagatctttccttcttttgggtaattcctacgtatttaatttatgtatcgctattgctaaatggaatgactttttaaatttctttttcacattgctcctggtggcatattaaaagctactgatggatggtgattttggattctgccactttactggaattggtggatcagttctaatcgttttcttatgcacccctttacggtttctacatgtaagaatatatcaccttcaaacacggataatttgacttcttccccatccaattgggaggccctttatatcttctcttggcctgaaggctctacttaaaacttcttatccctttgttggaataacagtggggacaaatggacatcccttgtcatggtccca

SEQ ID NO: 193 - DNA, 493 bp, Homo sapiens
ctgctaaaatgatgttgctaaagcattcctttttcttttgattaaacttcatgtttacaaaaaaattaattctagcagaataacgaatggttttgttttctagttctctgctgaatgaacagttttgccaattatcttcatagagtagtgatataatgaatgcaacctcaaatgcaaaccaaccaattcacagtccataccccaatcacttccttcatcagcctcaaaaatcgctaagtgaaccagtagaatggttttggagcagtaataggaaagcaaatagaaagtcaagggggactttcaacgccaacaagaccaattcagatcctgatctgactggtttctaatacaatctctttccagagtaatggagcatgagtctgccacacagaactttagagagagtcctttatttcaaagactgtaaagttggaagaattcattcatctgcaaagtcaaatgtcaaaagttgtgcttcccactcctcatcagg

SEQ ID NO: 194 - DNA, 424 bp, Homo sapiens
  misc_feature 9, 12, 17, 30, 179, 187, 265: n = A,T,C or G
cyagggcanttnagcangasaaggaaatanmggggattcaattagggaacwraggakarwcaagttgtccstgtmtgcagatgmsgtgattgtatatctagamcaccccattgtctcagcccaaaatctccytaagttgataagcawcttcagcarmgtctcasgatscracmtcwatnsgcraaantcacmwgcattcttatacaccaatawcagacaaacagagagccaaatcatgagtgaactcccattcacaattgctacnmaagagaataaaatacctaggaatccaacatacaagggatgtgaaggacctcttcaaggagaactacmaaccactgctcaaggaaataaaagaggatmcaamcaaatggaagaacattccatgctcatgggtaggaagaatcaatatccgkgaaaatgg

SEQ ID NO: 195 - DNA, 229 bp, Homo sapiens
  misc_feature 12, 29, 35, 36, 38, 42: n = A,T,C or G
tgaacacccttnggaaggaacctgctcgnatgtannanaaanggaccggacagtctgctaaaatcgccctctttagacgcggcgcgccggggcagagtttttctctggtgctttgacctgtatttggtttaatggttttgtcctaatctcttcaatcaataaaattgtgcgtatttaactaaaaaaaaaaaaaaaaaaaaaaaaaaaaaaaaaaaaaaaaaaaaaaaaa

SEQ ID NO: 196 - DNA, 557 bp, Homo sapiens
gcggtggctcatgcctgtaatcccaccactttgggaggctgaggtgggcagatcacttcaagttgagagtttgagaccagcctgggcaacataacaaagtgagatcttatctctacaaaaaaattaaacaaacaaaaaaacaaatcaacattcatttgcagggctctttggtcttcttaaagaacaaacatatgaaataaataagctgattcttaaagataacaaatataatgagctttctcaactgtaaaagcatctctaagttgttctatcaatgcatatccactccatgaactaacctgaagaaagtgttgaccattctacccaattaactgtaaactaagattgctttaatggtttgcctaaatttgagtacctttaaatttttgctttttatccaaattcattctcccttcttcaaattaaatagttttgttagaaatcggataagcaagatgtactttttagaaagggcaatagaatcctacaacatgctagaatttgaaatgtttttttaaatcagtmmtttctctatgctagtaactaagaaaattata

SEQ ID NO: 197 - DNA, 624 bp, Homo sapiens
ttttactacctatatttaaaatgatccctgacgcccctcaagacaaatatattaatttttttactttgtgggatagagatcagaaaaagagtagagatgaaaatactggagaaacaatgcaggagatatttatgaggtgagaatgtcaagaaacttgtaaagggagaatactataatgacccctgaagagagagctttagaccagttgagtattagaggttgccacgtggctattcatccactaataaatacaagaaattactaaaatggaagccactggaaatatgttttgaggaaggtgagaatgtggacctattataaatgggtgaatatgatttctttctcattaagttcataaataactttcagacatgtaacagtttatgaagtgtgccgtagtcatttagtataagttttatacacaaaagtgtttttactaagactgtcacaggttcttttgtgaatcttgtttgtttttcctcattgtaaatactgcaatagaacatttgtgtcttaacataaggcaataaatgaccttaagaaccttcacttttatatagaaagtggaggaaaagttggcagagtaatttgttgattatagataaaagctcttgtagaaattgg

SEQ ID NO: 198 - DNA, 175 bp, Homo sapiens
ttttttttttttttttttttctaacacttatgcatttattttcatgtgtaagaagaaaaacgtaactagcacgtgaacatgactgcatggatacacggctcagcacgaggctaaagtcagaagtgagtgaaagcaaaaccgcatgttgatttaagtgaaataacagaacagaaaa

SEQ ID NO: 199 - DNA, 871 bp, Homo sapiens
ctgttgatcaatgatgagctcccaagagtaaccagcctctatatagtcagcatcactggtttctcaggaaaagcatcaccattgttcatcttgctgcaaaatgtatgcacaagtatctttttatttttaaaaaagccctgacattttatgactgctgcttttctaagatattttcaaatatacagtccatacggttcagacacaatggactggggatagagacggctatagtgccgataatggagaaactagccagagcttcagatatttgttttccaggacatctcaataattgggtacacctcacaatatgtgagacttgacgtcgagtggcacggcatactctggcgcaggcacttgataaagactgtgtttgcaaatacttagcctgcacttcaagataccaggcatctaagcacgtcccagatggtgacagttaatcttcaaaaaaccctatgtggaagtattatcattgtcctcattttacagatgaggaaaaagagacacagggatgtcaatatcttcctcaaggtcacacagcaagtaagtgatggaacagtggctcagccatgaagctattgctgttaaccactaggttgatttgccttcattaatttcttcctaaaactgcacatttcccgttagtccctctttttggtctgtcgtttgactcttggctactgcttagaggaagattcattctattattttctaacttagtaaatatgtgcaactccttggggacatgaccaggcaaaagctggatacagaaatgtatgcccaaacaccatcccaagttacccctaacaggtcttttctggaccctgtttgtaaggggggtatatttggaaaaatttttaaaattttctgg

SEQ ID NO: 200 - DNA, 737 bp, Homo sapiens
gacattttgaaggtaacagcaatatctgtgtatagatggggttgtggttttgttatttatctgctattgctgaactatcctttgtcttgagcgataaaagagaagtaaaatactaaagaactgaactgtccatttctggaccatgagtaaagatgctggctgtcaaacttcctgttcatacattagtttatttatagagtgtactctctatgtaaggtattgactgataatgttactttgacttcagatagcttgcagtttaatggaggaagaagacaaacatgcaaataactaggtcaatgaggcatcctttgtgttccattggaagctaggctgctttgtaaccttgttaatttctgtggttttggagtgcattcattagcaaatacaccccttgttcttatccattctctgcttttttctttatttggcatttgatgacattttttcatgtggggaaattgagtcaggtgaggtggaaagaaaataaggacacgacactaaattctttgatgtttttccttaaaaaattgtttttcaagtgctccataaagggttgtgaagttttaagagccataggacttggattattgtgaaagagtgtctctagggggccaggttaaaccatttcaaggactctccttctctcatctcccttgttccacccagggtggcgacccccaaaaagcacaaagcctccctttcttcatgggaagggtaaggaacggaagggaacc

SEQ ID NO: 201 - DNA, 493 bp, Homo sapiens
tctagaaatgcagcttttatttattaccccatttctttcaagtccttggaaaataacatattaagggtacaagaaattaacacatgatggaaaagtcattgtgacgccaatgaatttcattgagtataaactcatctacttcaaatttattttataacacaacctaagatactcaagataattatttaatggttagctcttaagttgaattggtctacataatgcgtgggaagaaaaccagatttttagccttcttgccaaatccagacctctggttgatttttctttgacagaagatgcaagttattttccaatttcacaattaaatgtatttaacatgaacattattttgctttaaaaactataaacattgtaggagaattatagccagtcttcagttataaccactccaccctcctcactttctctctctctctctcttttttttttgctatgggatttaatgggaaaaatatgtaaaaactgtcactaa

SEQ ID NO: 202 - DNA, 283 bp, Homo sapiens
cctttttatctcagtgacaccgtccggggacgcaggtggtggtgactcaaggctagcctcaaagggcagccccacctcctcatcctggaccacagagaccacctgcttggcgcgccgtcgcttttccgagagggtggctgactccggggtgctggggctggggctgccgcccccgccgctgttgctgtactcctcgccccagtcgatgggggctgccctcggacagcaggtgcaggttgggggcactgttacgcaagaccatgctgcccggagaggtagatct

SEQ ID NO: 203 - DNA, 713 bp, Homo sapiens
ctgcttttgcgcaaggtgccactggacgagcgcatcgtcttctcggggaacctcttccagcaccaggaggacagcaagaagtggagaaaccgcttcagcctcgtgccccacaactacgggctggtgctctacgaaaacaaagcggcctatgagcggcaggtcccaccacgagccgtcatcaacagtgcaggctacaaaatcctcacgtccgtggaccaatacctggagctcattggcaactccttaccagggaccacggcaaagtcgggcagtgcccccatcctcaagtgccccacacagttcccgctcatcctctggcatccttatgcgcgtcactactacttctgcatgatgacagaagccgagcaggacaagtggcaggctgtgctgcaggactgcatccggcactgcaacaatggaatccctgaggactccaaggtagagggccctgcgttcacagatgccatccgcatgtaccgacagtccaaggagctgtacggcacctgggagatgctgtgtgggaacgaggtgcagatcctgagcaacctggtgatggaggagctgggccctgagctgaaggcagagctcggcccgcggctgaaggggaaacccgcaggagcggcaccgcaggtggatccagatcttcggacgccgtgtaccacatggtgtacgagcaggccaaaggcgcgccttcgaaggagggggctgtccaa

SEQ ID NO: 204 - DNA, 275 bp, Homo sapiens
gtagacaagtacagcagatccagacaccagatctagctaggctaaatgtacagtatctaacttgatctgaactgaacctgtattccttgatgatgcctaaaactacatccatagaattctggtgaacctgtaatacagttctgaaagtacagttttatataataagatgctgatctctttattctttcaagtaagagtgctagagaacaaattgtgttacttgccttgggatttattgaacgtctggaaaatgctgtcttcctagatccaaacag

SEQ ID NO: 205 - DNA, 694 bp, Homo sapiens
ctgttcctgtacatttaactgaaaaaaaagtaacttaaaataatataaaaatagcactcatgtatgtcctacagttataggtgaaatttgatattgtttgtcttacatagcatacctatagacagcttaagtaaagtgactgttaagagggttatgcttattgatgaactcttgtagttgcttaccagctctgttagtatagttaaattgatctcagtagcttcaagtatttataaaatggttgaagtccaaatacatgtgataattacaatacactttgaattaatggagggtgggaggctagttgaaatgcattttatttacccaaggagtatgttaaaatgatagttataaatgttggaagtttaaagcaagatactcagtttagttctttacaaatcataagaagaacaaaattagatgttgacattgctattttaggctgtgtgttttccatatgcttcttgctttccctgtcacaggtggtggcagcaatattggtgtgattgaggttatgctggcaccactcgcacacaggcgcacaatggtgttagctgggcagaaagagtggcatctctggctaccgggctgggggcgacctttaccataggatgaagtaaccttgcattcggctgcaaggtgtactgtaccgtacacaggtgctgggtcgatggccactttctgcttttctttc

SEQ ID NO: 206 - DNA, 704 bp, Homo sapiens
  misc_feature 12: n = A,T,C or G
tttttttttggnaaaaacagggtttcatcatgtttgccaggctagtctcaaactgctgacctcaggggatttgcccgcctcacccaattcaactttcgtaagtcagtatttaccatctaactcagtgtcccaaaatttaaaatttccttgcactttacagcaaaaatacatattggggctctactgaagcaatatatacatgtcaaaactaaaaatcagaaaagcaaaagggtccattcaacatatagcagcttatatttaaatatgtacaggtatgtatgttttcacagttagatctttaaaaaaatttatatttgatatgttcaaaaatacttctattggctataaataatattttaaaagctcaactgatcaaaatgcattccaagaacatatcaaattaaataaatcttctacgtctttaaaaacagataattgaagtcagtaaagcttgaggtttgtgttaagtgtattctgtcagtccctactactagggaaggcagaatcttctaaatacgatacgaaagaaactcccaaagcttggaaggaatcggcagctcctgaactttttggggggggcatccctcttcgggattgacatgcgacataaatgttgcaagctaagggaccccccccgggggagtgggccccaaaaaaaaccacaccttccccgtcaatggtggtccccccaccaaccttaaaaa

SEQ ID NO: 207 - DNA, 225 bp, Homo sapiens
ccattttaactgtactgccaatagaattctggaattgtggaaaattgtatcattgaagttcagtaggatgtgtggcttaaaaatttatcaggaccacaaaaaagaaaacaaaaatatttggtactgaggttcattgccagggcaggaggtatttccagaaaatactcatgcctgtgttctgttccttgctttcccaaatactgcatgtgactttcctaagcggca

SEQ ID NO: 208 - DNA, 678 bp, Homo sapiens
  misc_feature 382, 391: n = A,T,C or G
cctatatctatcaaaaaaaatccagttcctaactaataatctcccaaaaagaaagcaccaggaccagatgatataaatggcaaattttttcaatcatttaaggacaaaataataccaattctgtatcatttcttccagaacacttcctaactcatcgtatgaggccagcatcactctaatagcaaaaccagataaagccattacaagagagagtgacagaccaatgtggttttattgaggatgcaaacaaaatttaacataatatttaatagtgaaaaactggatgctctttccctaagttagagattaaggaaagaatgtccccttcactactcccatacaacaccttactgaaaattctagctagctttataaaataaanaaaaaccanaaaataaaataaaaggtgtacagactggaagatacagtgaaggaggaagaaataaaattttctttgcgcataacatgattcttctatgtggaaatcacagagatttgaacattttttttttttgagacagtttttgctcttgttgcccaggttggagtgtaatggcgcgatctcggctcactgcaaccttcacctcccgaattcaaggtgattctcctgccctcagccttcccggagtaagcttggggattaacagggcatggcaccccccatgcccccagctaaat

SEQ ID NO: 209 - DNA, 720 bp, Homo sapiens
  misc_feature 366, 399, 406: n = A,T,C or G
attattttgaaccctagcatttagaaatgaaaaactttttataacaatcaaatacatgataaagtatgcaaagagtaggaaattattctgatgacatatggagggttacaaaggagaaaactttttgctacctctgataaagaatagactaaattctccaagaccaatctgactggtgtcataataaaaggaggtacacacggaagcacaagggatgtgtgcctctggaggaaaggtcaggtgaggactcagtgagaagacaagccaaggagccaggtcttggaagaagtcaaccctgttgacaccttgatcttggactaaccctgtggacaccttgatcttggacttttagcttccagaactgcnagaaaataaatttttcttgtttaagccacccanagtgtantgttttgttatggcagccctaacaaattaaaattatattttaacagagaatataaaattctaatataacattttacagtaaagcattcatggtcttttttttcttattaataaatccatcaaaacagaaagttttgcaaaattttaacacatttctctaccactactgtttctactctcttaaaactactccgcaaatataaaaatagaaggccaaaatgcatcattaaaacgatgtttggggactaatggccttaaaattctattacacttggaaatatacaaatattcaaagattatctattgatcacctca

SEQ ID NO: 210 - DNA, 277 bp, Homo sapiens
tccatgtatttttatacagaatggaacaatatgtatgtatgcaatykttacattccaccatgaaataaaacagtataatgaaaataacaatagattcaaacaatgatatgctatttttttttacctatgacattggcaaggtcttcttaaaaaatctgcgaataaccgatgttggagagatcatggggaaatagccactcaaatgttactcatgagagtgtacatatgtgtaacttcacttggagggcaatttggtgatacatttaaaaagttttgg

SEQ ID NO: 211 - DNA, 715 bp, Homo sapiens
gtggtagaaatactaattttgcaattacagaaaaaaacaaatgccattcacatggttyctaacaaaaagtgtctgaccacccccaccccccacccctcaaaaagcccttaaataaagaggaagatcaaaagaaaacaaaataattcccgagtttcacctcatacatacaatatagcacaggaagtggcaaagtttaaaataatgcctttactgttaggactagtatgctgtcaaaagccacaatccttttgttttagtgagttgattttcaatagaaaaatacaaatgaacatgtgtttaagttccaacatggattgagcacctctgaatttagtatcaaatgattaattttatttttcagatgtcaaatcttagtataaaattttccattattttaaacttcacttgaatctttaaaaaagctgtctaaattgtactatatgagttcagtttaatcttctgtaaaatgctaacaaattgaactgtcagcagtcttttaaaaaaaaatgggggctgggttatttctagaagaactctcattaagctttgaaaatcagaaatcagagacaaataacttcagatatagactagctccacaagcaaatttatacaattatctgtaacagtctatacatatatgtgtatatatatataccgtaaccactttcataggtaaaaaatattaacttcatgtcacactatgatcagaagtata

SEQ ID NO: 212 - DNA, 717 bp, Homo sapiens
agcctcccccaatgccttaaaaggtcacagtagatctcagctctgaacagaaactcaactgaaactcttcccacaacccagcagtagatatattaaaacctacaattttcagggatacaaccaatatttaattcttttgagggttttgtgtttaatacaaggacacaaacacacgtataaaatgacgatgtcaatactgattaaacagaacaacaaaataagaagctcaaattatcatcagctattgtgtatatctgaaataacaataatgcacttgattctgaaagaatgattagagttcctactctgaaaatctaattgtcttgatgtggcgaagtgagaagaaaggatgatttttctaatgaaaagcatgtatacgggtagccctttgcgagattctgtcaaaaccctgaattttgcattagctgttttaccacccaaacgtttttacccgaggatgtgcagcaatgggaactctcatacactgcttgtgggaatataaatcagtataaccactttggaaaaccatttaacattgtcaactacagctctacacacaagtgctataaccacccattccactccagggtatacaccctaaaaatatgaagtgcccatgtctacccaaaaggccgcctaaaaggaatgcttttgagaagggttaaccttgttaattagtggcaaaactgggaaaacaacccccaaatggtcccatcc

SEQ ID NO: 213 - DNA, 599 bp, Homo sapiens
cctgttttggcgaggcaggagggaagcgggatgggagtggtggttaggccaagggtagttcaaagcgattcagcaggatgatgaccacaggagtgctggagccgggcctttcagcccccgtgtggatgatgaccggccatccaggacatgcgagggcttgggacagtggacagccagtgccacacaaggaaggaccgattaaatgacacagttaaaggaatttggcctagggagtgcaagccagaaaggtttggtctttttatatatgtaacattggaaaaaaggaacatctcctgttccctgtattaagttttgactttagctcagcaaatgcagtgtttgtggcagtaaatatactctgataacaatgttctttcccaggaatttagagttttatgatggttattgaaaatgtttacatgacaggctgtcaataatattttttgcctctaaaaataaaacatacataaagtgtacggattttaagtatgcaactcactgaacttttcataccgtaatacaccaccctagtaaccctcccccagttcaagatgtagactgtttccaataacccctcatcctgttccttaatagccccc

SEQ ID NO: 214 - DNA, 789 bp, Homo sapiens
ccttatgacaaaccttgctatgccaaggatatgcttcactatcttcatctatcaaaacactatgcatcatagatatctaattttttcatctcttgcatgaagtctttcctgatttccctctgctgaaatttctctcttcaaatgatgtgtttccatagtactttgtcccttttcaaagatatatctcacatcgcatattttaccacagttagtttcatttcttaactctcacactagattacaaagtcaatatagacaaagaaatgttcaaccttatataacctcctctgcctatgctggtaaattgcacctactatgtgttcaataagagcttgtctttttcaatatacaaaactttgtaaagattaaagaccttgtagaaagtcaagaggaagatagcaatttcacttctaagaacttaccctaaggaaacattcatgaagagatacaaggggttatgtgcatggatgttcattatcatattattcttcattatgaagattatgatggtaataatgaaaatgattatcttgtattgggccttatttgaagtcaagcattgagaatgtactttatctgcattatctcactgagttctcgtagcagccctataaggtacagactgttatctaagcttaaaaaaataaagttaatgtccaaggtcaaacaactagtaaaagaagggggctaggaaatttggaaccccaaaaggggcaacctctcaagggctatgaatccttaccattattataaggaagcttggcccatggtggcccaaaaaaaaccggg

SEQ ID NO: 215 - DNA, 765 bp, Homo sapiens
ggatgtctgagcaggagagagaccatgtgaaggatggactgaatggagacttgtatcaaagagtctgagtatcaaagacttgtattagagagggttgttgtagtaatctagtcagggtatgagaaatggtttgtattagagtgtcaggagtagtcgtggcaaaaatatatagatcaggatgagggatgggcctcatctcacaccctgactccagtcaatggcagtggctccctggagtacactactataggaaggattttgtaaagttttgtctggcctcagtggagggtgaggtaggggaggagttctatgaacagttagtggtgtctgccatggttgaaacaatggagaagggggacaccttttctgtgcagatgttgcttctggtagatataatccacaatgtaatgggagaagtactaagaatcagtaaattatggagggtgtaaaagactactgatatttaagcctgcggaccggacttagagaaatgatagttaaaggagaaatatccagcaaacaaagatatgacattgaagtttgggactgcgattagtaccagagatttggattggaggtgatttgtatagaatggataggtgattttactcttgcaatttggattgaggggtggggaaaaccagaaaggggctggggggtaaattagtagaaggtcaccttgaattcattgtggtccatatcaatgctgaaactgattggggaactttttactcttgagtccctttgtaagggaaccccagaaag

SEQ ID NO: 216 - DNA, 780 bp, Homo sapiens
cctttttctgtggcaaatggaggcttttcactgcctgtagagacaatacagtaagcatagttaaggggtgggtcagaacatgttaagataacttactgtatatgtattcccttgtattttgttaaagctggaacatttgatatttttccatttatttatgaaaaaatatgaacctattttcatttgtacaaggtaattgttttttaaagcaagtcaccttagggtggctttaattgtataagtcaagcacatgtaataaattcaaaacctgcagttaacaggatattagacatcaatcctggtaaccaaatattaaagattctctttaaaaaagactgaacatgtttacaggtttgaattaggctaaaaggtcttgcagtggcttttcatggcccttcaaattggaatggaactactgtactttgccatttttctataaatcagtactttttttttaattttgatatacattgtgtgaaaaaagaaaatggctaataaactgtattaaatcttaaacaatgtataaagattgcacttagccagttcaaagtgtatacttattcataatgaattataacagttatatttctgtgttttcttgtaaatgtttcttttcccttaaatacagataattcatttgtattgcttattttattatgagctacaacaaaaggacttcaggaacaagtaatgtattagtatggttcaagattgttgataggaactgtctcaaaaggatggtggttattttaaatataaatagctaatgggggtggtaaa

SEQ ID NO: 217 - DNA, 810 bp, Homo sapiens
cttttaggcagcccggcaccttcatccataggcagagagagaactgggtgttggagacttattcgagggtataggaagggccctgtgaagttgatttaacttttggatgtcagactgtgaaagctcctgagaaacttggggtaataggatcttcttttggggatgaaaatggggaaggcgtgaggacctagactacttctccctaggtcagaaaaagagaattaccccttgacaaatatgatacctgctaggtatttcccagggaaatttagggattggcgtctttccctagcatgtggaggaattggcagacagcttcctaagggcggggagcgggggcccaaggctgacactgcttgcatccacgtgaccttaagttatggcagatgactctgaaacggactgaggccaatgagaacagatggatggagcactcaggttagacttgttccttctcctatgctggaggagagggatggttctctagaatgttggaggtgagttgagagctcgcctcttgaatgttgaacagtgtactcttctgaaaactgcatattcactttatgtggtttcagaatactgggctcaatactaacataagaaagacacttcattgagaaattcttaagcttacagaaaacctatctctttgcacattccacataacccctagcaaaatgcaggttcttcatacttctgtcctttttccattggaagaattgcttaaggaaaaattaattcctatttattcccacaaaaggttgggcattgctttgattttaccccatgggggaatgtgcctttgaattt

SEQ ID NO: 218 - DNA, 817 bp, Homo sapiens
ctgctcccttatggaggtctcttcattaataattattggatagatagagaaggtgagcctgtggcttccaagtaccggcttttgctgaaggtctacatgggaagaagagcatcatttgatattcagtagatctgccacacccaactggctccatctcctggaaaacagcactcactacaagcaactgtaatagcacccagcaatgaccacgctgctcctgctggctcttccgtacaccagtaaatgaactcaccaatgtattgcacacatacatttcacagtagtacaataaagccctgtatcaggagtggtaattcaatgacttgactctatagtgcactgcagctttatgtcataccaacattcaaatattcaaatatccttccaatccatttggacaaaaatacaccatggctgccaagacacatgtatttttctttcttccatggactcctaaactgctcccacaatcagcagtgttcttctctcagaaattatcttaagcttctctactcaatgggaggtacacacagagacctgagaatatgcagaggccagaatctctgtctgtgctagagatcaactgtactctgcccacctggggaacacatcctctgggtaaagtactcggaagtaaattacattccctggagacagatacgggctttcactgcagcctgttagaaaacacaatgtctgtaagttacctcataggtcaaagagttttggattatatttttcataatggggctatggcctttttaccctggttttaatacagaaccacctgcagaaaggacattgaaattaaaagcca

SEQ ID NO: 219 - DNA, 661 bp, Homo sapiens
ggatgctgaggcaggaggattgagtcctggagtttcaggatacagtgagctatgatcatgccattgcactccagcctgggcaacagagcaagattctgtctctaagaaaaggaaaaagaaaatgaatagatagtggtattagatgttaatgacatcagttgtttttattctttattctttcttagaaacagattagttttctcgaattaaagaactaccatttttcttttttctacaactttcaagagctggtgaagaaatgatgtttagatttaatagatatagtagcagtcatatattaatagaatagaaactgagactctaggaaaaagatagacatgagataaggagtaggcatggtagacatttctagattatttatgaaaatgttgtagaattcatttttttttttggtctgacctttggcaatggtgctgaggaagggaaagccagcccatcaggcaaggctctgttttctgcattttatcccgtttgattcttctcgttaggattggagcaaataatttcaatatgttcttcgctgggtttatcatagtgacccttcatttaaagggacttttaacaattgacttaaagaacactgagatgtgatattttattgggatttgaaagttgccattgggttttaccttccttaatt

SEQ ID NO: 220 - DNA, 792 bp, Homo sapiens
  misc_feature 169, 171, 172, 399, 400, 401, 402, 643, 666, 724, 727, 731,755: n = A,T,C or G
cctctttttattcctacaaataattttcaagtacacacaattgggtaaacaaagaaacaaagccaccaagaatgaaaatcagtaggaataacgaacaagactcacagatgtcaaacaagtctgtgggtcttgcagacttcagatgttggaattattagtcgtggcaagngnncaaaacattagctattaccattatgtttaccaactagtgaagtgaactatgagaggatatattaaccacagaagttaatagaagaatagactcctgaaaatatctggatgctacaaactaaaatatagtatataatccttcatagagtgtcagtgacttcatatttataattacatttttgtatattagcagtgttctagttcttactgccttatctttaagctgannnnaaataaaattatattttgggattcaaaaacacatagctaatgattactatgtggcagtgttacattactttatcacatatcattaacataatctgcatgtgttcaaagagatcttcatacttctttgtagctcccacttctttgtcgtctttgtagctcccacaacatctagaacagcacaaccgtatatggagaaaactcagtctagtattcgttgaatgactaatggaaaatttagttnataaacagaactttcttcattgnacaaattatcttgcagaagaataatggccttagtttaaaattatcatatttacccatntcnccangttattttatctcttttggctaanaattttgaaaacggtaccttttaccctttggcatttt

SEQ ID NO: 221 - DNA, 759 bp, Homo sapiens
  misc_feature 245: n = A,T,C or G
cttttctgctgctccgggaggtggagtggcctggcagagggcacatggctgccacctgctgcaaggaaaattctcagtgaagactcctcagtatgaaggagataagcctgcacaatcagtcactgatagatgcttagtggaaaaacttccaattcccatttacagctctcagagctaggattaaaaactcctggtcataaactcatgtgatgagaagttatagcacgccctcattttctacatanccacttgcatttatggttggcttttgaacttgctagaagggaaagaagtgcaaatgtgtcctccttagagctactctcctccccttggtgggtttccagtttgtgcattgtccagatggcccaggagctgacgatcaaagggaagaagtcatgtttgtcatgagaatgctttgctgcatcaggattcagtgaagctgttcaccgcctggagcccatgcagcctcaagaggcaggatggagctcagaaaccatcactgaggttagaaagtgagcaccaaagttgagggaagcccacaggagtgagccgaagtgctccctttggatttccaaagtgggtgctgctgcttcttccatcagccttgcttctgaccccaatgcgttcctggtgccttcttcttggcattttgctgtcgggggcccaaggaaaaaaattcctgcatggcagtggtgaaaaaagatggctgcctgctgaaacctgatttggcctgggtaagccttttggagccccggttaa

SEQ ID NO: 222 - DNA, 699 bp, Homo sapiens
  misc_feature 5, 7, 77, 81, 84, 85, 278, 289, 291, 298, 301, 368, 395,433, 441, 508, 569, 633, 646, 667: n = A,T,C or G
ccttntnaagagttggcattaattcttcactaaatgtaggagtagaatttatcaggtaagccacactgacctctggncttnttnncgcccgatgatttttaattagttgaatccctttacttgttatatatgtattcatatattctgttccttcttggatttacttttatgattggtgcctattgaggtatttatttctagtttgtggtacttcatgtgtttaggttttctagacagtggacatagaagattcaagaagctaaatgtaggagaatgtntaatgtagganantgaggcnacnatatcatcaatgaatgacttgaagtttcctctgttgtaaagaatgatattaccataactgccatagntaatattgatggtgtaagtcaaataanaaggcaggaggaaagggacatccatcactgaaccacanatcagagnctcattgaagcctttgagaagaatccacaaaattttacaggataattcatttcctgcgatcaccacnagaagagaaactggttaaacagacaggtattccagagtccaaaaatttacatttggtttcngaaccaaagacctcagctcccaggccacagcaaaagggggcttatgaattccctggcacccagncccaagacccaanaacctcatcttgattggtttngggcttgggaaaccaaaaaaccaatgggtggc

SEQ ID NO: 223 - DNA, 598 bp, Homo sapiens
aaaaagagaaagtttcagatttgccattcaaggcttatttatatatatgtgtgtgtatataaatacatgcacacacttgcatacatatatatttttggctgggggagtgtgagttttgcctttctaagggagggaccgcgcaggctcctttgttctgtattctggcggagatgggtcctggccttgtgtcactggcttatccttaaagatcatctcccatcctccccagcgccatctgtgtgcagcaaccagaaagggatgaacttggccctcttgcgggcctggacaaggtctcttccttaccctttctgttgccagtcagcaacctgtaactcacattctcttcccagtgaatccctgggagcgcctgaccctggtgggctgttcagcttcctgctgctggggccagcaatttttgaggatttatctttaggccaggcttgcctccgtacttatccctgctctcccatttctctcttgtttgagagagaatgaggaagcaaagagtgagaaagaataggggctgaagacgccactcccagatggctctttctatcctgctcttctgttgaaacacacgtgctgtgggcctcaggcg

SEQ ID NO: 224 - DNA, 501 bp, Homo sapiens
  misc_feature 479: n = A,T,C or G
aaacctttatgatgacttccttatgaattactgaacgaacactggaatgggactcaggtatcctgaggacatctctcaactctggccttagttccccctctgtaaaattagggtgccaactaaatgatctacaaggtcccttccagcgccgccattctgtaattacatcatgtgtaactgtattaaacatacacaagtgactgccaggcatgggaatgtaacttccgagtaaatgctttggtttgttcagaatacactatgaacttctttccaaagacgggttgtggtaaatagtggatattttgattataagaaatagagtttccttgaagctttagctggagatacagcaatagtgtggtgttcctacaaatatcacagtgtattcaaacatatttttctatcaaaaatcatttttgtaaaagctgtgtgtttttatccaacttgtgataataaatgttctttattttagaacaaanaaaaaaaaaaaaaaaaaaaaaa

SEQ ID NO: 225 - DNA, 295 bp, Homo sapiens
cctgtatagggctcgtttccccacacatgcctatttctgaagaggcttctgtcttatttgaaggccagcccacacccagctactttaacaccaggtttatggaaaatgtcaggaaaaaaaaaaaaaaaaacacatgcactcacacaatacccaaacatcaraattagaagggcataaaacagggggctttataggctgaaaaatatcttaratttcaraacagaataccaatcaaatattgaaaattcctttgttcaaaacacaaagatgttttgtttttaatgggagttttttt

SEQ ID NO: 226 - DNA, 372 bp, Homo sapiens
agattcctggcttagagcatgcgagcattgaaggaccaatagcaaacttatcagtacttggaacagaagaacttcggcaacgagaacactatctcaagcagaagagagataagttgatgtccatgagaaaggatatgaggactaaacagatacaaaatatggagcagaaaggaaaacccactggggaggtagaggaaatgacagagaaaccagaaatgacagcagaggagaagcaaacattactaaagaggagattgcttgcagagaaactcaaagaagaagttattaataagtaataattaagaacaatttaacaaaatggaagttcaaattgtcttaaaaataaattatttagtccgtatgaaatgaaat

SEQ ID NO: 227 - DNA, 599 bp, Homo sapiens
ggcccccgtcgcgggagccgcttcgggccttctgggcatgtctgccatatggctccaggtttgtttttctccccggcactctgacggggagggctcccggcatctcctggcatccgggtagaggacgcggaggatgctgagctgctggcgcactgcagcacaactagagatgtacggatgcccccatcttgatcttacagaatcagaggtacagccgcgagaaagagtcaagaacagacagagtcgcttgaggactcaggagggtgtttgctgcgttgacaacagactacaccctcacagtttgctctgctcttccaacaccagtggaagatgatcacatcccagggatcagtgtcgtttagggatgtgactgtgggcttcactcaagaggagtggcagcatctggaccctgctcagaggaccctgtacagggatgtgatgctggagaactacagccaccttgtctcagtagggtattgcattcctaaaccagaagtgattctcaagttggagaaaggcgaggagccatggatattagaggaaaaatttccaagccagagtcatctggaattaattaataccagtagaaactattcaat

SEQ ID NO: 228 - DNA, 343 bp, Homo sapiens
aaagtaaattgtatgaaaaattcatttcttcaattgcattagccacattttgagtattcatgtggctggtagattctgtattagcacaaagatatggaacatttccatcaccacagaaagttctgttggacagcactgcattagaatattttcatactgctcttcctcaattaatttttgttgttaatgttgatgtcttcattggatgggtcataatgttccatgaaaccgctcaagtacacaattgtatgttctttgtatcccttaccacaaatatctcgctctgctcatttcttttgcagcttcctataaagtttgtcttcctcaaaaaaaaaaaaaaaaa

SEQ ID NO: 229 - DNA, 417 bp, Homo sapiens
ctcaagctgcagtccaccgggtatggttctggatggttcccccaagggagcaggtatgtaggaggtgaagaaaactgagatttcaagtatgggagagtttttactatctccattcctggattaaaagtgctgaaaaagtccacagttaaacattcctttattcaccctatggctcccaagaaaagcattcttcctctggagtactggtgtactaaggggacaatacaccaaatttgttgagtttacaatcaagtctactaaggttggacttccttatcagtttggcagagtcccagggcagaataatcatccatctacaggtctctgtttcctctccctccgcagcagtggagagcatcccagtgtttggggcactgtgttcctcttcgtccctgcaccagaccctggaagccttgg

SEQ ID NO: 230 - DNA, 462 bp, Homo sapiens
gaaataccagaagagaaagtttcattgtgcaaatctaacttcatggcctcgctggctgtattccttatatgatgctgagaccttaatggacagaatcaagaaacagctacgtgaatgggacgaaaatctaaaagatgattctcttccttcaaatccaatagatttttcttacagagtagctgcttgtcttcctattgatgatgtattgagaattcagctccttaaaattggcagtgctatccagcgacttcgctgtgaattagacattatgaataaatgtacttccctttgctgtaaacaatgtcaagaaacagaaataacaaccaaaaatgaaatattcagtttatccttatgtgggccgatggcagcttatgtgaatcctcatggatatgtgcatgagacacttactgtgtataaggcttgcaacttgaatctgataggccggccttctacagaacacag

SEQ ID NO: 231 - DNA, 328 bp, Homo sapiens
ctgtgggttttcctaaacgcccctcatctggttgaagccctagtgtttctttctcacatcagaggcaaatgcattggggtgggtctggtttggacaataaatttcctctggtttggaccaagaaaaacagagttctttgaccgctaacatatatgtaaaaagaaagtttgtaaaaacaagagttaaaatgcttctaacagtgtggtcatcactgcacaggacactggaattggcattcggggttgtgtctgtccatgtggtttcgttgtatgtcatgtgctctcagctcagacagagacatccaattgacttctgacttggggcattt

SEQ ID NO: 232 - DNA, 595 bp, Homo sapiens
cgccaattttagcaaataagagattgtaaaagaagcagattgaatgaagaatttttagctgtgcagataggtgatgttgggatggaaaatgctaatcaactaccctttcttttatcaagtaattaaaataaatctacataaagaaccaaaaaggctgttttataaaagtgaaatatccagtatttcagagggccaggcaagagcacttcagatgaggcagtcaaaatcatttttttccagtgaggatagaccacaagtgggtggtgagaccattgaaagcctttatcaactgaagagtccatttaacagcataatttgtgggaagactggaatagggctgaataaatgtgtttgaatctctaattttatactttcttttcctgaggaacttgatttttctgtccctggatcgccttgtcataattgggtctgttccttttactaccactcttgagtccatatatgaaatcattaaagttggatgatcagttttttataaaaatatatatttttgtccaagaaaaaaaaaagcatacatatgtgattatggctaaatcaaaggtaactggaatgtatatacttttgctaatgttcc

SEQ ID NO: 233 - DNA, 600 bp, Homo sapiens
atgaaggtaaactctaaaatcttcataggtcaacaaagaaaatttatccttcacacttatttctagaaagcagcagggcttatttcctagattgcttacaatgaagctagaatatctgcgataactgtagagtttcaaaaaggatccctagggctacttctacgttctccttaccagttgagcactctccataatttccagacgggtcatgggggagaatgatagaaatgagcgtgggaagaaagacaatgaaattagaaatgggtgagacacatggtggtagaatgctaagagcagggatcaggacaatcaaccaggtgtctaggaagggtcaagtcaccagtgtcatctgctgaccaatgttaggaagaaataaactcaaaggaaacaccacatttttccaattaaactcaaatctattgacttgtggtggttctttgatgttgtggggactgctataacagaaaccaattggattttcaagggcaagaaactttgccactgaataagatgatgtcatccttcctgataacaaataggaatgggtggtcagctctaaacagcgtggactgagggagttgcttttctacaatattactt

SEQ ID NO: 234 - DNA, 500 bp, Homo sapiens
aaattcctaattcttttactatcttctcaacttttcccaaagataaaataaatttcacataatttcatggaggggaaatggtagttgtaaaaaactacctcaagtagcaatcaccgctggcagtgttttctcactttctgttctgcaattgcaatcacacttccaaaaagaaaagcaaatgtttgctaaaccatagacagacaacctctttgtgactggtattataaggtttataatgaaaacttatcaaatataaaaggtgctccctcttgaaaatgtgtattttatttgaagttttgagtaagaggtgagtgtttggcaattttcaacactcccctcaaaaatctcccaaagttgcaaaaaagtcagtttagtaaaattccaagcacttaaatgcttcattgagggccagttgatatacgcaatgcactaatgtgtaaaaattaaccgaatgcaactattttataatggagagctcttaccttttccttccagttttt

SEQ ID NO: 235 - DNA, 159 bp, Homo sapiens
aaaatttacagataaaggcagttcaatactgccactgagaagtacatctcttaacatatacaactttcaggccacagttttgaaggtctgaagtattaagttggtttgatgaattagtcggttggcacttacgaacacatttattgccttgccatcttt

SEQ ID NO: 236 - DNA, 254 bp, Homo sapiens
aaataagtgaataagcgatatttattatctgcaaggtttttttgtgtgtgtttttgtttttattttcaatatgcaagttaggcttaatttttttatctaatgatcatcatgaaatgaataagagggcttaagaatttgkccatttgcattcggaaaagaatgaccagcaaaaggtttactaatacctctccctttggggatttaatgtctggtgctgccgcctgagtytcaagaattaaagctgcaagaggact

SEQ ID NO: 237 - DNA, 591 bp, Homo sapiens
  misc_feature 497, 505: n = A,T,C or G
tttttttttttttttttttttttttttctaatttttactttttctcaagtttaatgtaracatacaaraaaacatcaagcaatgtttattgkgcaattccaatcattatttgcaraatcttggtttaaagtcagtytttatagccatttcaactgcttggtttaaacaaaaagcaacaatctggttatytacctataaatttcatggtatttytttaaacactgaagtactaaaagcactgatgatttgtattataatttttaaaatatttaaaacctacacagatttcataratcattccttttataaaataatcaaaataatttgattatytggaaaaaaaaattcttgaaacaragccctttccaggtatyttcaatctctgtaaaaccccaaaccccaaacagagtaratgatgaaataaggatttctcagttgcccaagactgtctgaaatttaaggttgaaaaatggactggcgtttttcatgtttcctgngaattcanagcttacaggtggcatcaaaactcaaatctctgggatggctttacatggctttcactttgatttgtttcattttcatttgcttctt

SEQ ID NO: 238 - DNA, 252 bp, Homo sapiens
aaatggcttttgccacatacatagatcttcatgatgtgtgagtgtaattccatgtggatatcagttaccaaacattacaaaaaattttatggcccaaaatgaccaacgaaattgttacaatagaatttatccaattttgatctttttatattcttctaccacacctggaaacagaccaatagacattttggggttttataataggaatttgtataaagcattactctttttcaataaattgttttttaattt

SEQ ID NO: 239 - DNA, 153 bp, Homo sapiens
ccacaataaagtttacttgtaaaattttagaggccattactccaattatgttgcacgtacactcattgtacaggcgtggagactcattgtatgtataagaatattctgacagtgagtgacccggagtctctggtgtaccctcttaccagtcag

SEQ ID NO: 240 - DNA, 382 bp, Homo sapiens
aaaaaaaccatctaaaagtggttttttaatatatatattttttccaaaggaagaaatttcttgcttttactcagggaaaaaaaaaaattaaggtacatttgagtagaatgatttcatctaaaagagttctttcaggagacatctgtgattcactgcattgtttttattttcttctttttcctcttcttttccaacatttctaccattttcctcttcttggttgatatcaggccactttcttttgttgctttcttactgtcacctgttaaaccgcgtttctttgtgttaggttttgaccgcttttcttctttgtgcactgtgtcaccaggctcctttttgccaattttggactgttctttacttacaggagaaggctctgcag

SEQ ID NO: 241 - DNA, 400 bp, Homo sapiens
ggcatgagccaccgcgcccggccctatcttttacttttataaatagagatgaagtttcaccatgttgcccaggctggtatcgagctcctgggctcaagcgatcccccaaccttggccttccaaagtgctgggattacaagcgcgagccaccgaaattattcttaactagcaagactaggctctgacatcacatccttatagttacatccctttaagcagggttcagccactcactctgcacctggagaacttgatggttatccctcgaagtgacagtcctgcaaatgacaaaaacactccaaatctattaggttggtgcaaaagtaattacgctttttgccactgaaagtaagtcccacaggaccctgagggaaatgggagggtggggtatacatagcag

SEQ ID NO: 242 - DNA, 75 bp, Homo sapiens
actcacatatgcagacctgacactcaagagtggctagctacacagagtccatctaatttttgcaacttcctgtgg

SEQ ID NO: 243 - DNA, 192 bp, Homo sapiens
gctccacatttgtagcgaacactttgactccaaagagaaggaggaagacaaagacaagaaggaaaagaaagacaaggacaagaaggaagcccctgctgacatgggagcacatcagggagtggctgttctggggattgcccttattgctatgggggaggagattggtgcagagatggcattacgaacctttgg

SEQ ID NO: 244 - DNA, 616 bp, Homo sapiens
aattttatagcaatatactgaccattctaaaaataacaaaatacatgttgctctcaactacatagttaaaaaaggtagtaaattctcttacccaaaatagaggaggggtgggctagtgagctgctcaaacatttgtaacaaataaaaatgtatctatatacatataatgatcatgttttcatagcctaaaatcaccatacaaaatctaataataaaattgtgtcgtgttcaggagttgggaagccaacacattaaattaacaaagtatttttggtatatgtaaataatgggatagaatctctcgaatcaggattgtcccagaagttctaaggcagatgtcaatgacatgcacattgtccatgttcagtaattttcaaagactagaataaactatgtaaactattcaatacaattcaatattacttaactgctaaaaagtacttcaagatcttgcactgccttgagtgagtataatcaaattagtaattggaaaatagctgtaatagcaggcactgaagaattctgacaaataccaaataactgtttgtttttaccaaataaactggtaagatgatatcacaaagggttttaagttattttgctatacaaggttttt

SEQ ID NO: 245 - DNA, 165 bp, Homo sapiens
ttggaacagtggattaaaatccagaaggggaggggtcatgaagaagaaaccaggggagtaatttcttaccaaacattaccaagaaatatgccaagtcacagagcccagattatggcccgctaccctgaaggttatagaacactcccaagaaacagcaagacaagg

SEQ ID NO: 246 - DNA, 229 bp, Homo sapiens
tgtactggatccctccaggtgggggcgactctcacctgactattacaatagcctcctaagtggtttccctacttgcaaccttgcccgtataatatctatcctccacacagcaggcagggcgatcctttaagaatagaagttagatcatgaaaatgctctgctctgatccctgcaaaagctcgccacctccttacagtcaccgctgaactcgtagcagaggttcaggagg

SEQ ID NO: 247 - DNA, 338 bp, Homo sapiens
  misc_feature 67, 206, 244: n = A,T,C or G
ggaaaccgtgtgtacttatcctggatgatgccaccagtgccctggatgcaaacagccagttacaggnggagcagctcctgtacgaaagccctgagcggtactcccgctcagtgcttctcatcacccagcacctcagcctggtggagcaggctgaccacatcctctttctggaaggaggcgctatccgggaggggggaacccaccancagctcatggagaaaaaggggtgctactgggccatggngcaggctcctgcagatgctccagaatgaaagccttctcagacctgcgcactccatctccctcccttttcttctctctgtggtggagaaccacag

SEQ ID NO: 248 - DNA, 177 bp, Homo sapiens
tgaaaacaaatgaattctcaactcctacggttcatgtagagtttagagaaaatttccatcattgtcatcattgaactgtgaacctgggaagccagatcatgattaacactgacatcaagtttcaagttgcagatcaatgcacccagtgttcagatgaggcaaacttctccgtgacaa

SEQ ID NO: 249 - DNA, 263 bp, Homo sapiens
aaagtaatgactttattaataaatatacatccatatgatgatgtagatacaaatcatgaacactactccattcccatacacataattgcacacgagtagctcaagttcatggacataaaaacatacacagtatctattcagactttttacagcagaggacagcgtgcttattatcagttaattggtaattattttctccaaaattacctgtggaaaaaagaaattctgaaaacttaaaagaatcaaagtgatctgattacttt

SEQ ID NO: 250 - DNA, 333 bp, Homo sapiens
aaaaaaaacaacagcgtaaatattagcccacaagagcagtcctaaacaatcacaattacactgtactacccaagaagactgtttattgtgaagcatttacctttcaaaaaatcattacatttctatttcttggtggagcagcacattgtggagtgtgattcttaattcttcattgagtttgtcaataggacattgatgctggataggttgtcttttgtttttatgcctcagaccatcttgtgagattgtttgcctatctcataatacagttttatgcagaaaggttgaaactatgtaaatggtttttatggaaattatcagttacaatatttt

SEQ ID NO: 251 - DNA, 384 bp, Homo sapiens
aaaccatttgtacaaaacttctataaatttttctctctctttctctcttatgtacaaaaatatcttaatatatccccgaactggttaggatagatacaaatagattttttataataaaaaattcacaaaagattggaagcattctataatgaaaatggtagaaaagacagtgtgagggaagccatggggtttgggaatcgggccctggaggagaagcagagtttcaaagggctgagaatagcatagtttcactgtaaaccaatgtctacagcttattggggtgggggctactgagacgaaagacaccaactcgtttctagagggctaagaactgcactttaagaaagggcggggaggtgaagggacccgagcaagaactttcag

SEQ ID NO: 252 - DNA, 211 bp, Homo sapiens
aaagcagtctgaaaatgggacatctgtagagaaattcatttccttcttctcctccggatgtggaatggaagctttgagggaaggaaaagtaggaaaagagcgggatgggatgggatgggatgggatgggatgggataggaagagaggctggggaatgggcagagaagggggtgctgagtgtgctgtgagatagagcaagatcacaagaagg

SEQ ID NO: 253 - DNA, 135 bp, Homo sapiens
aaaaattgtttcttgacaagctgacttggcacttaagtgcacttttttatgaagaaaaagtacaatgaactgcttttcctcaagcaataattgtttccaacttgtctgggaattgtgtgtctggtaactggaagg

SEQ ID NO: 254 - DNA, 361 bp, Homo sapiens
cctgtagcccctgctacacgggaggctgaagtgggaggatcacttgaaccaatgagggtgaggttacagtgagcccagatcatgccactactctacaggctgggtgataagagtgagaccctgtatcaaaaaaaagacaaggaaaaaaaaaactgggccgtttgtttttgcagaatgtctctcaatttggactttttgggcaggaatacaatacaagtgatacaaatgcttctttaacattagaacctgtataaaattaccattacagaccttgctattttacttataggtaaatcactgtttaccaaggtaagtcttttgggaatttccaaaaatgaagtccatggacagttaaaaactg

SEQ ID NO: 255 - DNA, 331 bp, Homo sapiens
aaaaaaataaataatccaccaacgtgattgaccttggcgagatcatgtttctagtctatacctcagtttccccatctgtaaagtgaggataatgtcccaccccatgtaactgtggtgaggaccaactgcaacactgtgcctgcgagtctccttggaaaagtgtaaggttctacacaaatggaaagtgatctgatcacactcagtgtccccagcccagcctttcagtgccctggccctggggtgggggacaatactctcctcacccccttcactagtcttcatgaatagcaaggaggccataacataatttggtctaaaccccttccttttt

SEQ ID NO: 256 - DNA, 186 bp, Homo sapiens
  misc_feature 115: n = A,T,C or G
cctttgggcccttgcactttgacctgcaatggggccacaccagccttgcttgtgtccacctggaaggactgagggaggttggcacgaaccatgcctgggctcaggccgggcccanagcacttgaccttggacgcatctgtcacatcatgcacagggaccttgaaaggactgcctggcacttgatgg

SEQ ID NO: 257 - DNA, 255 bp, Homo sapiens
ctggggtccgtcaccgacctttggggaactgggctacggggaccacaagcccaagtcttccactgcagcccaggaggtaaagactctggatggcattttctcagagcaggtcgccatgggctactcacactccttggtgatagcaagagatgaaagtgagactgagaaagagaagatcaagaaactgccagaatacaacccccgaaccctctgatgctcccagagactcctccgactccacacctctcgcggcag

SEQ ID NO: 258 - DNA, 604 bp, Homo sapiens
ctgaatttgcaatggagtttggtggtgcaatcggtattgattagtttggcatagacagatgcagcagtttagagcaaaatcgagaaaatgattttttttttcctccttgatttcctggcagaagatatcttactttttcagcaaacttttcttttaacactaaagcagcctagggcaatgccagatacttagagcttttctcttgattataagtagaaatgggggtgtctgggctagaggtggagggtggatgtgctgtcgtcacagtctagctggcagcaagcaaggcaaaagcagagactgctctagaagcggttccaagcagcagagacgtcaggaaaggcacttcttagtaccaacctctatgctttaatagttgcttgttaagctgcttcatgggttgagacaaactaccagcacttcaaagagctcagttctctgctcaactctcttctctagttacattattttttttccttcaggagactgaggcaggaaaatcgcttgaactcaggaggtcgaggccgcagtgagccaagatcacaccaccgcactccagcctgggccttgcaaagtgctaggattacaggaatgagccaccagg

SEQ ID NO: 259 - DNA, 429 bp, Homo sapiens
aaaaatgtctgtatcgagatcttccagtttgaagtcttcctcctctgtgtcttcccaaggctctgtggcaagctccactggttctcccgcttccatcagaaccactgacttccacaatcctggctatcccaagtacctgggcaccccccacctggaactgtacttgagtgactcacttagaaacttgaacaaagagcggcaattccacttcgctggtatcaggtcccggctcaaccacatgctggctatgctgtcaaggagaacactctttactgaaaaccaccttggccttcattctggcaatttcagcagagttaatttgcttgctgttagagatgtagcactttatccttcctatcagtaactgctccgtgttcagactcctggtttcttccaggcttacagtggacatcatcagcttcctgcttt

SEQ ID NO: 260 - DNA, 385 bp, Homo sapiens
  misc_feature 179, 318: n = A,T,C or G
ctgcaacacatgcagcaccagtctcagccttctcctcggcagcactcccctgtcgcctctcagataacatcccccatccctgccatcgggagcccccagccagcctctcagcagcaccagtcgcaaatacagtctcagacacagactcaagtattatcgcaggtcagtattttctgaanacgcatatggcagacggatttgcgtataccaaggagagtggcataggagggaaaagcatatgtggctgaaacctgtaagttggtgttggttatgcagaaatgtgtaacagatcaaacggtcctctcaagtgtctattanataggcaataagaactgcagtgtagctgagtaacatcttttagctgactataaatcactttgttttt

SEQ ID NO: 261 - DNA, 230 bp, Homo sapiens
ctgtactggatccctccaggtgggggcgactctcacctgactattacaatagcctcctaagtggtttccctacttgcaaccttgcccgtataatatctatcctccacacagcaggcagggcgatcctttaagaatagaagttagatcatgaaaatgctctgctctgatccctgcaaaagctcgccacctccttacagtcaccgctgaactcgtagcagaggttcaggagg

SEQ ID NO: 262 - DNA, 198 bp, Homo sapiens
  misc_feature 88: n = A,T,C or G
atgttaagtaaacatgaaatctatataacagaacaaaaattcactcttatgtcaatgtcagcgtgttaatgtagatctatttactganacagactctgtagtggcagagagtggccttgttaagccaggaccctgttctgcaggctgtgggtagaagctaggaagtccctggagtttcacccagcttttccatgaatg

SEQ ID NO: 263 - DNA, 157 bp, Homo sapiens
aaaatatatttctaaacagaatgggccgactcagtcacagtaactgttgatctccatagtagagcaacccacaaagacagaactgatttttttcccataatcaggggtgaaaaatatacaacttgtttctgaaccaaaaccacaatttctgcagttt

SEQ ID NO: 264 - DNA, 290 bp, Homo sapiens
ctggctactccaagaccctggcatgaggctgaggacaacttacaagggcttcaccgaagcagtggacctttattttgaccacctgatgtccagggtggtgccactccagtacaagcgtgggggacctatcattgccgtgcaggtggagaatgaatatggttcctataataaagaccccgcatacatgccctacgtcaagaaggcactggaggaccgtggcattgtggaactgctcctgacttcagacaacaaggatgggctgagcaaggggattgtccagggagtcttgg

SEQ ID NO: 265 - DNA, 234 bp, Homo sapiens
aaaaaaaggaaaggaaagagaggaaaagaaaataaaataagacgatttattgcttctcctcagcatcctccttggtctcctccttcaccgagagagcttctagcttttccgccactttttcggcatgatcatttttgcctgatcctttcttttctctctcttcgatctctttcctgcattcttcaaactttgttttgaatttctgtgcattctcagcattcaggaagcggatgg

SEQ ID NO: 266 - DNA, 335 bp, Homo sapiens
gtcctcatcatcccagtttgaggcagtgctggagtggggaaggccgtcttagaccatagaggttggaagacgctgagagatcatccagcccagccccttgatgttacagagcagaagacagatgcccaaacaggagaaggcacttgcccacggtcatacggcaggttgccacaaaaccaagatggcagcccttcctcagcgtgcctcactgccactcccagagccagggagccccataaaacccacatcatgtcttaagagtatatctggctccttgaccagcaatcggccctgggagccaccaggtgggaaaagcgcctctgccagagtccagg

SEQ ID NO: 267 - DNA, 619 bp, Homo sapiens
  misc_feature 69, 86, 119, 205, 352, 547, 580, 611: n = A,T,C or G
tggagctctgacgaagggatcggggaggtgctggagaaggaagactgcatgcaggccctgagcggccanatcttcatgggcatggngtcctcccagtaccaggcccggctggacatcgngcgcctcattgatgggcttgtcaacgcctgcatccgctttgtctacttctctttggaggatgagctcaaaagcaaggtgtttgcanaaaaaatgggcctggagacaggctggaactgccacatctccctcacacccaatggtgacatgcctggctccgagatccccccctccagccccagccacgcaggctccctgcatgatgacctgaatcaggtgtcccgagatgatgcanaagggctcctcctcatggaggaggagggccactcggacctcatcagcttccagcctacggacagcgacatccccagcttcctggaggactccaaccgggccaagctgccccggggtatccaccaagtgcggccccacctgcagaacattgacaacgtgcccctgctagtgccccttttcaccgactgcaccccanagaccatgtgtgagatgataaagatcatgcaanagtacggggaggtgacctgctgcctgggcanctctgcca

SEQ ID NO: 268 - DNA, 147 bp, Homo sapiens
cctataacccagacaccagcatggacaaaactcagttatactgaattcagagacaaaattcagtgacactcttctaccacttatttagggttctacagcatttcactgagcagacttagttttttgtttttgttttacaaacctttt

SEQ ID NO: 269 - DNA, 325 bp, Homo sapiens
ctgagctgtaggaatgggttcttggtacacaagatagtattgttgagctagttttcgagctctgtgcacaagcactctgtaatcggggcccatgccactgtacaccaaacctatatgcttggtaattggttctactttgtgtacacttcgctcatcatacagaatggatttctgttttttctcagttgctaataccacaccatttgcagctttaattcccacggacggggctcctccagctacagcagccaaagcatattcaatctggacaagtttaccagacgggctgaatgtagtcagcgaaaagctgtacccgcgctccgcc

SEQ ID NO: 270 - DNA, 428 bp, Homo sapiens
aaacatatggtaaattaccgagtgacacctctgggctagagacctcttttgaggggagtttgcaaactacggattcaatttctttaacagttatgaagttctttaaagaacctgtttggtattggggggttgtggtcacctgtgcttttctgagatttggcccctacatctaagttgttgaatgcatgtgtgtagagttgtttatggtgcttccctttcttcttagaagggtctatagtaatatcccctgccttatccctagtagtactaatttgtgttttcttacttcttgacaggcaaacacatcagagcataagtggttcctaatgccaagctgacctcccttgatctctgtcttctacaggatattgacatgggacttctttattaccttttcagttcactgataccttcaaatagctttattt

SEQ ID NO: 271 - DNA, 206 bp, Homo sapiens
  misc_feature 18, 21, 33, 118, 180: n = A,T,C or G
cgtcccggagcccacggnggncatggctggcanagcgctctgcatgctggggctggtcctggccttgctgtcctccagctctgctgaggagtacgtgggcctgtctgcaaaccagtgngccgtgccagccaaggacagggtggactgcggctacccccatgtcacccccaaggagtgcancaaccggggctgctgctttgactcca

SEQ ID NO: 272 - DNA, 83 bp, Homo sapiens
ctggcttccctgagaactcaacaatgccttttcctgagggccttcctcgatcatccacaatgactacagccctctctacctgg

SEQ ID NO: 273 - DNA, 472 bp, Homo sapiens
ctggagaaggtgtgcaggggaaaccctgctgatgtcaccgaggccaggttgtctttctactcgggacactcttcctttgggatgtactgcatggtgttcttggcgctgtatgtgcaggcacgactctgttggaagtgggcacggctgctgcgacccacagtccagttcttcctggtggcctttgccctctacgtgggctacacccgcgtgtctgattacaaacaccactggagcgatgtccttgttggcctcctgcagggggcactggtggctgccctcactgtctgctacatctcagacttcttcaaagcccgacccccacagcactgtctgaaggaggaggagctggaacggaagcccagcctgtcactgacgttgaccctgggcgaggctgaccacaaccactatggatacccgcactcctcctcctgaggccggaccccgcccaggcagggagctgctgtgagtccag

SEQ ID NO: 274 - DNA, 205 bp, Homo sapiens
ccaggcggcccgaggacttacggtcggcacttctctgttctcccgtgtcagcgtgtggtgtcgcctgcatgggtcgtacctggatggtgtgtccaccatcgacacggaggggctggatttgtttctcaggcaatcctgtattttaattttagatgtatttcctgaagcatatttttcatagaatgtagcgtgtaaatagcttttt

SEQ ID NO: 275 - DNA, 308 bp, Homo sapiens
ctcctcgccctccccaccgacatcatgctccagttccagcttggatttacactgggcaacgtggttggaatgtatctggctcagaactatgatataccaaacctggctaaaaaacttgaagaaattaaaaaggacttggatgccaagaagaaaccccctagtgcatgagactgcctccagcactgccttcaggatatactgattctactgctcttgagggcctcgtttactatctgaaccaaaagcttttgttttcgtctccagcctcagcacttctcttctttgctagaccctgtgttttttgcttt

SEQ ID NO: 276 - DNA, 201 bp, Homo sapiens
aaattaactttttcttgcaaaatattcatttcattttttccaagaaaatcttataaaggcaaaaataaaattttattttggcaaatgtcatgaagtcgatactggcagcatatggagttagttaaaaatagacaacaactgctagatatattcaaaattctatttttttttctgagcatagtcaaagagaaattttcattt

SEQ ID NO: 277 - DNA, 520 bp, Homo sapiens
  misc_feature 32: n = A,T,C or G
aaaaaaaaagtattcagcaccatttgctcatnggtctttcagagtttgttcttaaagtttctggaactttcctgtctgtaaagtaacaggaattactgagctacattggaaagcctctctgggacaggcagtggggagttaagcagtcatcataaaggaatcagtgtacattcagcatggtgacttgactacacaacaatcccttcccctctactgtagctcaagagagacatgcttctaaccactgaggtatgaggagtctcagactgttatttgctgttagaattggtcttcccagctaataacagtacatctctggcacagatgctattggtccttaatgtcctgtgattttaggaaatagtttggatttagttcaatttattcagaaaccaaacgtgtttaattagcttcactactctggcagagtaagggtatgctggtttagtatctttataaaatatatataatgtataggtaaatcatagtcttaaatcatacctaaaatactgtatcattt

SEQ ID NO: 278 - DNA, 264 bp, Homo sapiens
cgcgccgggcggaactttccagaacgctcggtgagaggcggaggagcggtaactaccccggctgcgcacagctcggcgctccttcccgctccctcacacaccggcctcagcccgcaccggcagtagaagatggtgaaagaaacaacttactacgatgttttgggggtcaaacccaatgctactcaggaagaattgaaaaaggcttataggaaactggccttgaagtaccatcctgataagaacccaaatgaaggagagaagttt

SEQ ID NO: 279 - DNA, 414 bp, Homo sapiens
aaacatacaataatttttattatggaaattaatctttacatacaaaatcagctacgtaattttacttacaaaacaataaaaactgttctttactgtggcaacaaaagaagcattttgacaaatgaaaaaaattaatgcaaacaaattaaaacaatgcttttctttttacttgcttcactgtctcttctatttattttctatgatcatttgacacaaacatggattactttgatatctactgaaacataaatgataaggttcttaaaggttgaattaaaagtctgggtgttcaatattttagaagctgaataaacaaaacgaaattggggtttgtgattacagaggatttatcattttttccctttgtccatatgaaaatatataatagaaaattacccacgggaaaacattttt

SEQ ID NO: 280 - DNA, 262 bp, Homo sapiens
ccaccatgcctggcctgcttcaattttttgatgccactttgtaaacggcacttaattatggaaaataggaaaaagcaaaactaaaataaggaagaggatatatatataacttttcacaatctcttttctgatcccctttagatgcccagtcaaccaggaccacacacagatttcattttatttgtagagtatatgaaaagatttaatagtctcatgcattttattttacgtatactgatttctacgttttgactgactattt

SEQ ID NO: 281 - DNA, 349 bp, Homo sapiens
ctgtgacccgggtgcatcagtggatatagttgtgtctccccatgggggtttaacagtctctgcccaagaccgttttctgataatggctgcagaaatggaacagtcatctggcacaggcccagcagaattaactcagttttggaaagaagttcccagaaacaaagtgatggaacataggttaagatgccatactgttgaaagcagtaaaccaaacactcttacgttaaaagacaatgctttcaatatgtcagataaaaccagtgaagatatatgtctacaactcagtcgtttactagaaagcaataggaagcttgaagaccaagttcagcgttgtatctggttccagcag

SEQ ID NO: 282 - DNA, 381 bp, Homo sapiens
  misc_feature 209: n = A,T,C or G
aaacactaaatgaagcttctcacaatttctaattataaacaaaaggctgaaaacagtatgggaaacaaagtttcaaaacaaagaaaagttgagtaaaaggtgccccctctatggctcatctgaaagaaacattttactcagagaggcaaacatttctgatctaggagtaagtttcccactcactttgcaaggacccactcattctgcanaaagacctacaagtctttctggtctcaattgcaaagtacgtgaaaatgtgtatgaaagatctaaaagctaaatattagaataaggctaattgaaatcaaaattgtgtgctggtctaaatatacatcttcggcttcttcctttttagtaagtatttttatttcagatgtattt

SEQ ID NO: 283 - DNA, 543 bp, Homo sapiens
aatatagctcctccctacccccaacaatggaccctgcccattgcctcccagttccttgatcttcctaggttccacaactctctttttccttttagttttattccctccagccaaacctctcttattcaatattttgagccaatgggggagttatgtagatttttttccctacacattagctggccccttttatgaccaatgactcataaggcaagatgtgtggtggcatcttcggacaggcagcaggctttaatagggcagcctgggttggtggaggcaagcaaagctaattggcatgcgtgggaatcaaaccccaggccctgggctcattagcccatggtcaaaacaactgagccagaggaggtaataatttgcccaagaatatcagtagttcctttattagaagaaaatggctgatatggaagttggggaatctgaattgccagagaatcttgggaagagtaataagctcttagtctcaacaaaaagtgttttttcatctcagcgcgtaaagggtgctatatgggaacaaagaagtatttt

SEQ ID NO: 284 - DNA, 147 bp, Homo sapiens
aaactggtattttatctttgattctccttcagccctcacccctggttctcatctttcttgatcaacatcttttcttgcctctgtccccttctctcatctcttagctcccctccaacctggggggcagtggtgtggagaagccacagg

SEQ ID NO: 285 - DNA, 316 bp, Homo sapiens
cggccgaggtctggcttcactcctactccctctctgctcgcagcacgtcggccgccagctctttgatgtgttcccaggcccgctgcacatgggcagattccaccgtgcgagaacagatggcaaagcgcaggacaaacttgtccctgaggtgacatggaaccaagtggatttttttggcactgtttattctttgcagaagagcttcattcactttgttggaaccctttagccgaaagcagacaagccccagaatgacttccacacagatttcaaagcggggatcctggcgcaccagtgactcaaactcatgggacag

SEQ ID NO: 286 - DNA, 322 bp, Homo sapiens
cctggggagccctttagtggggtgggacctcaggcagacccccaaaccaaagggagccagatgcccaagttcaagtcattagtgatatgtggcagggctgacagagaaataatcctggaggtctccaaagctgctgggaatggaatggcgatgaaaagcgcaggagtgggcagggtgtggtgggtgatggtggcctcactcagagtggaccaaggccccagctccttgcccaaaaccaaagcccttgggcccgaagtttttagcataacatcctttgcagtaaatctcgccatccttgtctgccagggtggttgactcaagg

SEQ ID NO: 287 - DNA, 364 bp, Homo sapiens
ctgcccacgctcaaaccaattctggctgatatcgagtacctgcaggaccagcacctcctgctcacagtcaagtccatggatggctatgaatcctatggggagtgtgtggttgcactcaaatccatgatcggcagcacggcccaacagttcctgaccttcctatcccaccgtggcgaggagacaggcaatatcagaggctccatgaaggtgcgggtgcccacggagcgcctgggcacccgtgagcggctctacgagtggatcagcattgataaggatgaggcaggagcaaagagcaaagccccctctgtgtcccgagggagccaggagcccaggtcagggagccgcaagccagccttcacagagg

SEQ ID NO: 288 - DNA, 261 bp, Homo sapiens
aaaattataactactcattctttctttagccttagttaatttgagcagaagccacaacaagcaaaccacaataaatttagaattggcagaaatccacattaactcctcttcccaagtttccacactactaccatttacagttgtaggtttgtaatgtataattatgtaatgcagaaactagctttgacttgtgtaacgatgcactgtcaaagtaagcaaagtaagaattgaaattccacattcccagaatttaacactcag

SEQ ID NO: 289 - DNA, 261 bp, Homo sapiens
ctgagtgttaaattctgggaatgtggaatttcaattcttactttgcttactttgacagtgcatcgttacacaagtcaaagctagtttctgcattacataattatacattacaaacctacaactgtaaatggtagtagtgtggaaacttgggaagaggagttaatgtggatttctgccaattctaaatttattgtggtttgcttgttgtggcttctgctcaaattaactaaggctaaagaaagaatgagtagttataatttt

SEQ ID NO: 290 - DNA, 92 bp, Homo sapiens
ccactacccgaacttacaggtgccaaaagaagaaagggtataaacggagaccacctatcactcatcagaacctaggatcatcacattccttt

SEQ ID NO: 291 - DNA, 287 bp, Homo sapiens
ccatggctccgctcagggccccggtcacctccgagtcactctgttccttgactgtctttgtgtttctgtacctcaaggcactgaagctggaggactctgtccatgcctgtgtcaccctcgtgtgggagcctctgggctcggcaggtccacatttcatgagctgaggcgtgggccagggccatctggaaagggaactcggcttttccagaacgtggtggatcatctgtcgggtgtgtggtgaacacgttcagttcatcagggcctacgctccgggaaggggcccccag

SEQ ID NO: 292 - DNA, 270 bp, Homo sapiens
ccattgtttcctcgctggcgaaggctccttgaacatccctcaccttcctctcccgcctctgccttctgctgggtcaaaggtggccttttctctccagccttgaattgttccctgttggcttcccaagggcccatctgctggtacagtccacacttccacagccaagacccgagagggctttcactgccccaagcctctctcctgtgaccctgggattctgtcttggcagaatcctttgtcagcggctcttactctgtccttcctgtttgg

SEQ ID NO: 293 - DNA, 333 bp, Homo sapiens
ccatgctcgtcaacctggtgtccactgcttgctacgtctccttcctcttcctgggctgcgacactggccctgtggctggggttactgttccctatggaaacagcacagcacctggctcagccctggacccctactcgccctgcaataataactgtgaatgccaaaccgattccttcactccagtgtgtggggcagatggcatcacctacctgtctgcctgctttgctggctgcaacagcacgaatctcacgggctgtgcgtgcctcaccaccgtccctgctgagaacgcaaccgtggttcctggaaaatgccccagtcctgggtgccaagagg

SEQ ID NO: 294 - DNA, 123 bp, Homo sapiens
ctgatacaaatacagaaaactctgcccattatccaagaaacaaataattaagactaaaatgcaagctgatgtgttgcagcattgtagggccactaaatagccatctgtgattcgtggcaattt

SEQ ID NO: 295 - DNA, 311 bp, Homo sapiens
ctgcatacagacatttgtttaggtcatctggattatcttgattgtcaccatggcaactatccacaaccagtgcctaggtgtgtgagaagagtgatacaataatactgtggcatggtcatttagctaatccagtctaagcctaacagaaaccttttccatcaaagtttttcagagaataacaacatctcataagaggccagaggatggcttgtgcttaatatcacacctgtacagtagggcagtgcttcccaggctgtctgcttacattttagcttgtcttacggttacatatggttttagtattttcattt

SEQ ID NO: 296 - DNA, 241 bp, Homo sapiens
ctgcggaagatctgcaaccacccctacatgttccagcacatcgaggagtccttttccgagcacttggggttcactggcggcattgtccaagggctggacctgtaccgagcctcgggtaaatttgagcttcttgatagaattcttcccaaactccgagcaaccaaccacaaagtgctgctgttctgccaaatgacctccctcatgaccatcatggaagattactttgcgtatcgcggcttta

SEQ ID NO: 297 - DNA, 295 bp, Homo sapiens
aaacacaagatgaaaatactctgttctgtccaaagcatcacctaatggtgtgaggcatctcacttagctgtggagaagtccttggaattagatctcagaaagacagctttaagacagtaaaaccttttggcaatgggctaattgccttaaaagaagagttctacctgaaagaccttgcaggtggagaaattgtcctacaaagattcttggatatgttagtggagataactgacatgggtagctgtgggtcaaccaggaactgtcaacaacctgatctctgcaaaaccaggatgga

SEQ ID NO: 298 - DNA, 347 bp, Homo sapiens
ccaaaataaagcttcaggcaagaggcaaagatccagtggaatatgggagaatggtggaggaccaacacctgctaccccagagagcttttctaaaaaaagcaagaaagcagtcatgagtggtattcaccctgcagaagacacggaaggtactgagtttgagccagagggacttccagaagttgtaaagaaagggtttgctgacatcccgacaggaaagactagcccatatatcctgcgaagaacaaccatggcaactcggaccagcccccgcctggctgcacagaagttagcgctatccccactgagtctcggcaaagaaaatcttgcagagtcctccaaaccaacag

SEQ ID NO: 299 - DNA, 268 bp, Homo sapiens
aaaaagtaaacatgaaaacatcacgaattgtaccatgattcaagaataacttttgtaatagaaaacacatgaccttttgcagtatagtgtgataccgaagtaaaagtgaaagaaataaatgcaggaaagtttaagtggatgtaagtttttataaggaaagtaataagaggaggctgcttttgaaggtcctttgatcttccatgatgataatatcgttgcaaagttctttaacttgtattcaagtaattagcagttgaccacttggttt

SEQ ID NO: 300 - DNA, 185 bp, Homo sapiens
aaattggagaaggaagttttcctgaagagccagaatccttgctaagtcatttagatccaactgaccatctttatttctgtcaaaaatcttcatcatggtgccggtgtattcttccagtttagcctcagaaatggcctttctgtggtgaagaaagaggtctcggaggaagttgcggagctcagcag

SEQ ID NO: 301 - DNA, 75 bp, Homo sapiens
aaaattggaaagtgggataagaaatctaaagtaaccagcttatctttgaaacaatattattttgaaattggcttt

SEQ ID NO: 302 - DNA, 247 bp, Homo sapiens
  misc_feature 159, 188, 212: n = A,T,C or G
ccatgttctctgaattgggtgcagaagacaagggcagagtggctgcggcccctattacctttgtagcagccacatcagaaagcagaagaaaacagtatttctgaaggcattgtttgaggttgatctcagcactgaacgatttcaagccctacgcaccanaacagaaggagggtggaggaagtgatcanagggaacgagctgtaggtttgcanaaatgtgtgaaaccaaaatgatcactgcctacttg

SEQ ID NO: 303 - DNA, 535 bp, Homo sapiens
ctgcttcagaggaaatcactgaaaaataaagaaaaaccatccatgcatggctgcatccagtgtacctgtaatcctgaagaaaaggtcctaattccttccatgctgaaatgctagctttggtttcagagagagactttattgcaactgtgaccaccgtcactggtgagcactgctgttcggcccccagcggacttaaaagactggaatgtggtagtggcggtcgttctcggtcagcagggagatctccggccagtccctgagaggctcctctgggtagcagacttcaaagtctctggagttaaacttgaacagtctgaacacttttatctttacttcaagggagtatccaagtataaacatatcaatctgctctagtccacatgtgtcgcctacagaattcaggtgattcatcatgaagctcaaaggatcagaggatgtctccctggaaaacaggagtctaaaaagactgggaatgacctttttagtcttcatttgttcataaacttcagtgacttgatacagcatgatgaacttt

SEQ ID NO: 304 - DNA, 522 bp, Homo sapiens
ccgcgctcggtctacaatcacgttttattattggctcgtctagtcatgggatagagaaggtaaatagcaaaatagaaagaaaagggggaaaaggtagaaggcaaggggaaaactattggttttagatctttatcctggtcctgtcaatgatcaggtaattggaaggatcaaaattaggccaaacttggtaattgggccaaaattgaaccaaagtttgtgtcaagaagacctggggcagagatatgtgactaaatcatttggaatatgcccagaccccaagaatatttatgcccaacttgaatgctaaccagaagtcccttactgtagaagattgtaaggttgctatttttttgccccgacaccaaaatattgatgtattttccaacaccaattctccaattctctgacaccaactcgatgttcaacaattcagttatattctgtcactaattcctgcagctatcagcaggccccacaggtaaaggattcagtctcacaagattgcccccccacccacttcag

SEQ ID NO: 305 - DNA, 165 bp, Homo sapiens
cctaaagcgctcctcgctgaagctcaaggggtccacaatgatttgtttgtcaaagttattgagtgcatatgccagttctcctcctcctccaccctggtgctgtgaggcatcgtctgaggcagtggcctgggctgcattggaaatgcctgtgaccgcctgctgcag

SEQ ID NO: 306 - DNA, 294 bp, Homo sapiens
ctgcacctaagacatggccctggctaggcgggaacagctcacagtagcgatacattcacaggacacagttggtgtccagaaaagggggctcagaacacagtttctacacaagcacttggcacccacacgacagagacgtcactcaagcagcacagccacaaatagtttacagcagctcatgcccggcatccgcccatgctgggagactccctgaaaggtgggcacctgccgtctatgaggaggtgtctccctccatcattaaccccaaaccacacaatgtgtgaggagagcagg

SEQ ID NO: 307 - DNA, 181 bp, Homo sapiens
aaaaatccatgacaccttgatagaaattagagtttacacaaacaaaaaaggaaccttcgatattgccagcagctataaagtgaacgtactgagaccgacaggacagcaagaaggcatttgcacatttatatctgacacccgaccatactttcagtcaccagaatatcttctctccagattt

SEQ ID NO: 308 - DNA, 179 bp, Homo sapiens
  misc_feature 138: n = A,T,C or G
aaggctgaggactgctgggagctcagatcagcccggagctactggctcatgggcagccaaaaaatactggatctgctgaacgaaggctcagcccgagatctccgcagtcttcagcgcattggcccgaagaaggcccanctaatcgtgggctggcgggagctccacggccccttcagcca

SEQ ID NO: 309 - DNA, 129 bp, Homo sapiens
  misc_feature 28: n = A,T,C or G
ctgcccgcttgcccgtagctgactcagnttcctcatcttcatctccatcctcttcctcaccatcaccttcttcttcctcctcctcttcctccccaccttcttcctcttcttcgtctacctcattgtcag

SEQ ID NO: 310 - DNA, 390 bp, Homo sapiens
tgaggctgggggagagccgtggtccctgaggatgggtcagagctaaactccttcctggcctgagagtcagctctctgccctgtgtacttcccgggccagggctgcccctaatctctgtaggaaccgtggtatgtctgcatgttgcccctttctcttttcccctttcctgtcccaccatacgagcacctccagcctgaacagaagctcttactctttcctatttcagtgttacctgtgtgcttggtctgtttgactttacgcccatctcaggacacttccgtagactgtttaggttcccctgtcaaatatcagttacccactcggtcccagttttgttgccccagaaagggatgttattatccttgggggctcccagggcaagggttaagg

SEQ ID NO: 311 - DNA, 355 bp, Homo sapiens
  misc_feature 127, 131, 154, 156, 192, 204, 227, 242, 271, 274, 297: n = A,T,C or G
cctctctgtgctgctgaaggcagatcgcttgttccacaccagctaccactcccaggcagtgcatatccgcctgttgagaaatgccgtgtctagattgtggacaagagcctgcgtgattatgctatangganaaaaattcttcgagttccacccnanctcctctaaacatttggctcactcaaaacaaaaagncaccaatcttantactgctgaacttcatttatgtnacctaacattaaccntcgtaggaaaaccaaatagccctctcgtncangatatgttgctaaaggactaccntgttcaacacaacggctccggtgtgtgaactcctgtttgggtgattcccctactctca

SEQ ID NO: 312 - DNA, 498 bp, Homo sapiens
ccattcttttgaatctaatctattatcaatagcatcctccataatatctttgataaaaggtgtccaccgagagagctgaaaagtttcttctgcagaccgatcctttcttaacggtttgccttgttgagattggggaacaatgggaacaccaaggtaactccagttacgaatcatgtcactctcattttctatctttacattctggatcaacctgtccaaattttcttccgtagttccattaatactgaagatataaagtagaattgctcttattttatcacaattatcatgatttttgttgagtagaactggaaggagtactcgcatggaatctttcaccttctgtccttctgcatcagttccaagtgccaggtcctgttcagttttgcagagcttttctatattaagcttgaacttattcatgcaatcttctgctaagttaagatggacaacttgcttagtaatctgttttcggaaatagggcatctttttcatcag

SEQ ID NO: 313 - DNA, 653 bp, Homo sapiens
aaacttatcagatttttttaagttaggtaatttcaatccacagtggctccatatggttaaaaaaacaaaaacaaaaacgcatttaaggatacacgaagcagtgaaaacaaagccccagtattttcgctaaagtactggaaatacctgtttctaaaaacagctttatatttgtccactgcctagaatagctctcacccaaacctcaaaaataagagcagatagattttagaagcaagaaaaggtaaacagtgcccatattatttgagactggctctgctgccctccctaagccagtttacattctttgagattcttggagtgggtgagtcagggctgaagactgcacaggccatgtcccctgctccaactattcctcagaacgtcccaggtggagggagtggcctgtcgattttcactcattccatggagctctgtgtacatgaaaattcctccaagtgtggcttttgtcgaattcagagatacagcaagccacgcataaaacatggagtgtagagcactggtgtacctagcttagaaacaccctcggtgaatgtggtactgtggctcgaaaggaagcaagggacaggacccaggagactgggcggccaggctctcggagttccacacacacctgtgaagcccggccagcacag

SEQ ID NO: 314 - DNA, 513 bp, Homo sapiens
ctggaagattttgctgcatttggcattatactgtaatttacagtatacaacatctggggactcagtactatcttagcacagactaacttctcccactccgtcagaggtggcaggtggcgggtcggtggggagggccttttctccccataaatgcctgaactttaatttataccatataagaaatcagtgaaaggtaaacaacaaggttaatgtaactctattataaattttgcattttttttctctgtgacatatacaagtatatttttgtttttggagctataaattatttaatttagcaatcttcaaagctcataaatttcaacttttcaaataagaaattttaacttcaaataagaagtctaggactttatggctattaattttactatcaaaatatccaagggactccattcaatgtaatagttataattcttctaaatatcatttgaataattctttgtggacgctagactcaagactatgctacatccaaacagtacatctataacc

SEQ ID NO: 315 - DNA, 222 bp, Homo sapiens
  misc_feature 15: n = A,T,C or G
atttatattcaaggnatctcaaagaaagcattttcatttcactgcacatctagagaaaaacaaaaatagaaaattttctagtccatcctaatctgaatggtgctgtttctatattggtcattgccttgcaaacaggagctccacaaaagccaggaagagagactgcctccttggctgaaagagtcctttcaggaaggtggactgcattggtttgatatgttt

SEQ ID NO: 316 - DNA, 1633 bp, Homo sapiens
cgtggaggcagctagcgcgaggctggggagcgctgagccgcgcgtcgtgccctgcgctgcccagactagcgaacaatacagtcgggatggctaaaggtgaccccaagaaaccaaagggcaagacgtccgcttatgccttctttgtgcagacatgcagagaagaacataagaagaaaaacccagaggtccctgtcaattttgcggaattttccaagaagtgctctgagaggtggaagacggtgtccgggaaagagaaatccaaatttgatgaaatggcaaaggcagataaagtgcgctatgatcgggaaatgaaggattatggaccagctaagggaggcaagaagaagaaggatcctaatgctcccaaaaggccaccgtctggattcttcctgttctgttcagaattccgccccaagatcaaatccacaaaccccggcatctctattggagacgtggcaaaaaagctgggtgagatgtggaataatttaaatgacagtgaaaagcagccttacatcactaaggcggcaaagctgaaggagaagtatgagaaggatgttgctgactataagtcgaaaggaaagtttgatggtgcaaagggtcctgctaaagttgcccggaaaaaggtggaagaggaagatgaagaacaggaggaggaagaagaggaggaggaggaggaggaggatgaataaagaaactgtttatctgtctccttgtgaatacttagagtaggggagcgccgtaattgacacatctcttatttgagaagtgtctgttgccctcattaggtttaattacaaaatttgatcacgatcatattgtagtctctcaaagtgctctagaaattgtcagtggtttacatgaagtggccatgggtgtctggagcaccctgaaactgtatcaaagttgtacatatttccaaacatttttaaaatgaaaaggcactctcgtgttctcctcactctgtgcactttgctgttggtgtgacaaggcatttaaagatgtttctggcattttctttttatttgtaaggtggtggtaactatggttattggctagaaatcctgagttttcaactgtatatatctatagtttgtaaaaagaacaaaacaaccgagacaaacccttgatgctccttgctcggcgttgaggctgtggggaagatgccttttgggagaggctgtagctcagggcgtgcactgtgaggctggacctgttgactctgcagggggcatccatttagcttcaggttgtcttgtttctgtatatagtgacatagcattctgctgccatcttagctgtggacaaaggggggtcagctggcatgagaatatttttttttaagtgcggtagtttttaaactgtttgtttttaaacaaactatagaactcttcattgtcagcaaagcaaagagtcactgcatcaatgaaagttcaagaacctcctgtacttaaacacgattcgcaacgttctgttattttttttgtatgtttagaatgctgaaatgtttttgaagttaaataaacagtattacatttttagaactcttctctactataacagtcaatttctgactcacagcagtgaacaaacccccactccgttgtatttggagactggcctccctataaatgtg

SEQ ID NO: 317 - DNA, 4235 bp, Homo sapiens
gaatccaagggggccagttcctgccgtctgctcttctgcctcttgatctccgccaccgtcttcaggccaggccttggatggtatactgtaaattcagcatatggagataccattatcataccttgccgacttgacgtacctcagaatctcatgtttggcaaatggaaatatgaaaagcccgatggctccccagtatttattgccttcagatcctctacaaagaaaagtgtgcagtacgacgatgtaccagaatacaaagacagattgaacctctcagaaaactacactttgtctatcagtaatgcaaggatcagtgatgaaaagagatttgtgtgcatgctagtaactgaggacaacgtgtttgaggcacctacaatagtcaaggtgttcaagcaaccatctaaacctgaaattgtaagcaaagcactgtttctcgaaacagagcagctaaaaaagttgggtgactgcatttcagaagacagttatccagatggcaatatcacatggtacaggaatggaaaagtgctacatccccttgaaggagcggtggtcataatttttaaaaaggaaatggacccagtgactcagctctataccatgacttccaccctggagtacaagacaaccaaggctgacatacaaatgccattcacctgctcggtgacatattatggaccatctggccagaaaacaattcattctgaacaggcagtatttgatatttactatcctacagagcaggtgacaatacaagtgctgccaccaaaaaatgccatcaaagaaggggataacatcactcttaaatgcttagggaatggcaaccctcccccagaggaatttttgttttacttaccaggacagcccgaaggaataagaagctcaaatacttacacactgacggatgtgaggcgcaatgcaacaggagactacaagtgttccctgatagacaaaaaaagcatgattgcttcaacagccatcacagttcactatttggatttgtccttaaacccaagtggagaagtgactagacagattggtgatgccctacccgtgtcatgcacaatatctgctagcaggaatgcaactgtggtatggatgaaagataacatcaggcttcgatctagcccgtcattttctagtcttcattatcaggatgctggaaactatgtctgcgaaactgctctgcaggaggttgaaggactaaagaaaagagagtcattgactctcattgtagaaggcaaacctcaaataaaaatgacaaagaaaactgatcccagtggactatctaaaacaataatctgccatgtggaaggttttccaaagccagccattcagtggacaattactggcagtggaagcgtcataaaccaaacagaggaatctccttatattaatggcaggtattatagtaaaattatcatttcccctgaagagaatgttacattaacttgcacagcagaaaaccaactggagagaacagtaaactccttgaatgtctctgctataagtattccagaacacgatgaggcagacgagataagtgatgaaaacagagaaaaggtgaatgaccaggcaaaactaattgtgggaatcgttgttggtctcctccttgctgcccttgttgctggtgtcgtctactggctgtacatgaagaagtcaaagactgcatcaaaacatgtaaacaaggacctcggtaatatggaagaaaacaaaaagttagaagaaaacaatcacaaaactgaagcctaagagagaaactgtcctagttgtccagagataaaaatcatatagaccaattgaagcatgaacgtggattgtatttaagacataaacaaagacattgacagcaattcatgttcaagtattaagcagttcattctaccaagctgtcacaggttttcagagaattatctcaagtaaaacaaatgaaatttaattacaaacaataagaacaagttttggcagccatgataataggtcatatgttgtgtttggttcaattttttttccgtaaatgtctgcactgaggatttctttttggtttgccttttatgtaaattttttacgtagctatttttatacactgtaagctttgttctgggagttgctgttaatctgatgtataatgtaatgtttttatttcaattgtttatatggataatctgagcaggtacatttctgattctgattgctatcagcaatgccccaaactttctcataagcacctaaaacccaaaggtggcagcttgtgaagattggggacactcatattgccctaattaaaaactgtgatttttatcacaagggaggggaggccgagagtcagactgatagacaccataggagccgactctttgatatgccaccagcgaactctcagaaataaatcacagatgcatatagacacacatacataatggtactcccaaactgacaattttacctattctgaaaaagacataaaacagaatttggtagcacttacctctacagacacctgctaataaattattttctgtcaaaagaaaaaacacaagcatgtgtgagagacagtttggaaaaatcatggtcaacattcccattttcatagatcacaatgtaaatcactataattacaaattggtgttaaatcctttgggttatccactgccttaaaattatacctatttcatgtttaaaaagatatcaatcagaattggagtttttaacagtggtcattatcaaagctgtgttattttccacagaatatagaatatatatttttttcgtgtgtgtttttgttaactaccctacagatattgaatgcaccttgagataatttagtgttttaactgatacataatttatcaagcagtacatgaaagtgtaataataaaatgtctatgtatctttagttacattcaaatttgtaactttataaacatgttttatgcttgaggaaatttttaaggtggtagtataaatggaaactttttgaagtagaccagatatgggctacttgtgactagacttttaaactttgctctttcaagcagaagcctggtttctgggagaacactgcacagtgatttctttcccaggatttacacaactttaaagggaagataaatgaacatcagatttctaggtatagaactatgttattgaaaggaaaaggaaaactggtgtttgtttcttagactcatgaaataaaaaattatgaaggcaatgaaaaataaattgaaaattaaagtcagatgagaataggaataatactttgccacttctgcattatttagaaacatacgttattgtacatttgtaaaccatttactgtctgggcaatagtgactccgtttaataaaagcttccgtagtgcattggtatggattaaatgcataaaatatcttagactcgatgctgtataaaatattatgggaaaaaagaaatacgttattttgcctctaaacttttattgaagttttatttggcaggaaaaaaaattgaatcttggtcaacatttaaaccaaagtaaaaggggaaaaaccaaagttatttgttttgcatggctaagccattctgttatctctgtaaatactgtgatttcttttttattttctctttagaattttgttaaagaaattctaaaatttttaaacacctgctctccacaataaatcacaaacactaaaataaaattacttccatataaatattattttctcttttggtgtgggagatcaaaggtttaaagtctaacttctaagatatatttgcagaaagaagcaacatgacaatagagagagttatgctacattatttcttggtttccacttgcaatggttaattaagtccaaaaacagctgtcagaacctcgagagcagaacatgagaaactcagagctctggaccgaaagcagaaagtttgccggaaaaaaaaagaccacattattaccatcgattcagtgcctggataaagaggaaagcttacttgtttaatggcagccacatgcacgaagatgctaagaagaaaaagaattccaaatcctcaacttttgaggtttcggctctccaatttaactctttggcaacaggaaacaggttttgcaagttcaaggttcactccctatatgtgattataggaattgtttgtggaaatggattaacatacccgtctatgcctaaaagataataagaaaactgaaatatgtcttcaaaaaaaaaaaaaaaaaaaaaaaaaaaaaaaaaaaaaaaaaa

SEQ ID NO: 318 - DNA, 3347 bp, Homo sapiens
atcccttggaggcattcatggctgaagtggaggatcaggcagctagagacatgaagaggcttgaagaaaaggacaaggaaagaaaaaacgtaaagggtattcgagatgacattgaagaggaagatgaccaagaagcttattttcgatacatggcagaaaacccaactgctggtgtggttcaggaggaagaggaagacaatctagaatatgatagtgacggaaatccaattgcacctaccaaaaaaatcattgatcctcttccccccattgatcattcagagattgactatccaccatttgaaaaaaacttttacaatgagcatgaagagataaccaacctcactccacagcagttaatagatctccggcataagctcaatcttcgggtctctggtgctgcacctcctagaccaggaagtagctttgctcattttgggtttgacgaacaacttatgcaccagattcggaaatctgaatacacacagcccactccaatacagtgccagggtgtgcctgtggcattaagtggtagagacatgattggtattgccaaaacaggtagtgggaaaactgcagccttcatttggcccatgttgattcatataatggaccagaaggagttggaaccaggtgatggaccaattgcagtgattgtgtgtcctaccagggagctttgccagcagatccatgcagaatgtaagcggtttggaaaagcatataatcttcgatcagtggccgtatatggaggagggagtatgtgggagcaggccaaggcccttcaggagggggcagagattgttgtgtgtaccccaggtcgactgatagatcatgtgaaaaagaaagctaccaatcttcaaagagtctcttaccttgtgtttgatgaagcagatcgaatgtttgacatgggatttgagtaccaagttcgatccatagcaagtcatgttcgtcctgacaggcagactctcttatttagtgcaacttttcggaagaagattgaaaagttggccagagacatcctgatcgaccctattcgagtggtgcagggagatattggagaggcaaatgaagatgtgacacagattgtggagattctccattctggacctagtaaatggaactggcttacccggcgtctggtagaatttacctcttcagggagtgtcctcctctttgttactaaaaaagccaatgctgaagagctagcgaataaccttaaacaggagggtcataatcttgggctgctccatggggatatggatcagagtgagagaaacaaggtcatttcagactttaagaaaaaggacatcccagtcctggtggccacagatgttgcagcccgtggtctggacattccttcaattaagactgtcattaactatgatgtggcacgagacattgatacccacacgcataggattggccgcacaggaagagcgggtgagaaaggtgtggcctataccctactcactcccaaggacagcaattttgctggtgacctggtccggaacttggaaggagccaatcaacacgtttctaaggaactcctagatctggcaatgcagaatgcctggtttcggaaatctcgattcaaaggagggaaaggaaaaaagctgaacattggtggaggaggcctaggctacagggagcggcctggcctgggctctgagaacatggatcgaggaaataacaatgtaatgagcaattatgaggcctacaagccttccacaggagctatgggagatcgactaacggcaatgaaagcagctttccagtcacagtacaagagtcactttgttgcagccagtttaagtaatcagaaggctggaagttctgctgctggggcaagtgggtggactagtgcagggagcttgaattctgttccaactaactcagcacaacagggccataacagtcctgacagccccgtcaccagtgccgccaagggcatcccaggctttggcaatactggcaacatcagtggtgcccctgtgacctacccgtctgccggagcccaaggagtcaacaacacagcttcagggaataacagccgagaagggactgggggcagcaacgggaaaagagagagatatactgagaaccggggcagcagcccgtcacagtcacggagagactggcaatcggcatagcgatagtccacgtcacggagatggtggtcgccatggagatggataccgccatccagaaagcagcagccgtcatactgatggccatcggcacggggagaacagacatggaggaagcgcaggccggcatggggagaaccggggtgcaaatgatggtcggaatggggaaagcaggaaagaagcttttaatcgtgagagcaagatggagcccaagatggaacccaaagtggacagcagcaagatggacaaggtggacagcaagacagataagacagctgacggctttgctgtcccagagccgcctaaacgcaagaaaagtcgatgggacagttagaggggatgtgctaaagcgtgaaatcagttgtccttaatttttagaaagattttggtaactaggtgtctcagggctgggttggggtccaaagtgtaaggaccccctgcccttagtggagagctggagcttggagacattaccccttcatcagaaggaattttcggatgttttcttgggaagctgttttggtccttggaagcagtgagagctgggaagcttcttttggctctaggtgagttgtcatgtgggtaagttgaggttatcttgggataaagggtcttctagggcacaaaactcactctaggtttatattgtatgtagcttatattttttactaaggtgtcaccttataagcatctataaattgacttctttttcttagttgtatggccaggcagtccccattttaggagttggcttctgcaaattcaatccattgagctaactgttggggagcaatttggtagttgtagacatttgcagggaagggagatgtctgattctaaatgggagttgatgctcaggtccccagccaggtttgcatccagccctgagacatgtaggaaacacctttcagacccaggctctgaagattcccagaagccacaaggattgaagggaaaaggtgatcctggtaactgttccaggattgctccaggtttgagatggtattgctaaatttaaaattaaacaagaaacccaacaacagcttttaaagtgtcttctatctcattgtattttttttaacttgccccaatgatagaaaagtcttttgctgaaatgattttgatgatttttgtttatcgtttataaaaaggaaaagaaatatacaaactttgacttttgtgaaaaaaaaaaaaaaaaaaaaa

SEQ ID NO: 319 - DNA, 1814 bp, Homo sapiens
ggggagatgatccgagccgcgccgccgccgctgttcctgctgctgctgctgctgctgctgctagtgtcctgggcgtcccgaggcgaggcagcccccgaccaggacgagatccagcgcctccccgggctggccaagcagccgtctttccgccagtactccggctacctcaaaagctccggctccaagcacctccactactggtttgtggagtcccagaaggatcccgagaacagccctgtggtgctttggctcaatgggggtcccggctgcagctcactagatgggctcctcacagagcatggccccttcctggtccagccagatggtgtcaccctggagtacaacccctattcttggaatctgattgccaatgtgttatacctggagtccccagctggggtgggcttctcctactccgatgacaagttttatgcaactaatgacactgaggtcgcccagagcaattttgaggcccttcaagatttcttccgcctctttccggagtacaagaacaacaaacttttcctgaccggggagagctatgctggcatctacatccccaccctggccgtgctggtcatgcaggatcccagcatgaaccttcaggggctggctgtgggcaatggactctcctcctatgagcagaatgacaactccctggtctactttgcctactaccatggccttctggggaacaggctttggtcttctctccagacccactgctgctctcaaaacaagtgtaacttctatgacaacaaagacctggaatgcgtgaccaatcttcaggaagtggcccgcatcgtgggcaactctggcctcaacatctacaatctctatgccccgtgtgctggaggggtgcccagccattttaggtatgagaaggacactgttgtggtccaggatttgggcaacatcttcactcgcctgccactcaagcggatgtggcatcaggcactgctgcgctcaggggataaagtgcgcatggaccccccctgcaccaacacaacagctgcttccacctacctcaacaacccgtacgtgcggaaggccctcaacatcccggagcagctgccacaatgggacatgtgcaactttctggtaaacttacagtaccgccgtctctaccgaagcatgaactcccagtatctgaagctgcttagctcacagaaataccagatcctattatataatggagatgtagacatggcctgcaatttcatgggggatgagtggtttgtggattccctcaaccagaagatggaggtgcagcgccggccctggttagtgaagtacggggacagcggggagcagattgccggcttcgtgaaggagttctcccacatcgcctttctcacgatcaagggcgccggccacatggttcccaccgacaagcccctcgctgccttcaccatgttctcccgcttcctgaacaagcagccatactgatgaccacagcaaccagctccacggcctgatgcagcccctcccagcctctcccgctaggagagtcctcttctaagcaaagtgcccctgcaggcgggttctgccgccaggactgcccccttcccagagccctgtacatcccagactgggcccagggtctcccatagacagcctgggggcaagttagcactttattcccgcagcagttcctgaatggggtggcctggccccttctctgcttaaagaatgccctttatgatgcactgattccatcccaggaacccaacagagctcaggacagcccacagggaggtggtggacggactgtaattgatagattgattatggaattaaattgggtacagctt

SEQ ID NO: 320 - DNA, 3132 bp, Homo sapiens
ccgcagaacttggggagccgccgccgccatccgccgccgcagccagcttccgccgccgcaggaccggcccctgccccagcctccgcagccgcggcgcgtccacgcccgcccgcgcccagggcgagtcggggtcgccgcctgcacgcttctcagtgttccccgcgccccgcatgtaacccggccaggcccccgcaacggtgtcccctgcagctccagccccgggctgcacccccccgccccgacaccagctctccagcctgctcgtccaggatggccgcggccaaggccgagatgcagctgatgtccccgctgcagatctctgacccgttcggatcctttcctcactcgcccaccatggacaactaccctaagctggaggagatgatgctgctgagcaacggggctccccagttcctcggcgccgccggggccccagagggcagcggcagcaacagcagcagcagcagcagcgggggcggtggaggcggcgggggcggcagcaacagcagcagcagcagcagcaccttcaaccctcaggcggacacgggcgagcagccctacgagcacctgaccgcagagtcttttcctgacatctctctgaacaacgagaaggtgctggtggagaccagttaccccagccaaaccactcgactgccccccatcacctatactggccgcttttccctggagcctgcacccaacagtggcaacaccttgtggcccgagcccctcttcagcttggtcagtggcctagtgagcatgaccaacccaccggcctcctcgtcctcagcaccatctccagcggcctcctccgcctccgcctcccagagcccacccctgagctgcgcagtgccatccaacgacagcagtcccatttactcagcggcacccaccttccccacgccgaacactgacattttccctgagccacaaagccaggccttcccgggctcggcagggacagcgctccagtacccgcctcctgcctaccctgccgccaagggtggcttccaggttcccatgatccccgactacctgtttccacagcagcagggggatctgggcctgggcaccccagaccagaagcccttccagggcctggagagccgcacccagcagccttcgctaacccctctgtctactattaaggcctttgccactcagtcgggctcccaggacctgaaggccctcaataccagctaccagtcccagctcatcaaacccagccgcatgcgcaagtatcccaaccggcccagcaagacgcccccccacgaacgcccttacgcttgcccagtggagtcctgtgatcgccgcttctcccgctccgacgagctcacccgccacatccgcatccacacaggccagaagcccttccagtgccgcatctgcatgcgcaacttcagccgcagcgaccacctcaccacccacatccgcacccacacaggcgaaaagcccttcgcctgcgacatctgtggaagaaagtttgccaggagcgatgaacgcaagaggcataccaagatccacttgcggcagaaggacaagaaagcagacaaaagtgttgtggcctcttcggccacctcctctctctcttcctacccgtccccggttgctacctcttacccgtccccggttactacctcttatccatccccggccaccacctcatacccatcccctgtgcccacctccttctcctctcccggctcctcgacctacccatcccctgtgcacagtggcttcccctccccgtcggtggccaccacgtactcctctgttccccctgctttcccggcccaggtcagcagcttcccttcctcagctgtcaccaactccttcagcgcctccacagggctttcggacatgacagcaaccttttctcccaggacaattgaaatttgctaaagggaaaggggaaagaaagggaaaagggagaaaaagaaacacaagagacttaaaggacaggaggaggagatggccataggagaggagggttcctcttaggtcagatggaggttctcagagccaagtcctccctctctactggagtggaaggtctattggccaacaatcctttctgcccacttccccttccccaattactattccctttgacttcagctgcctgaaacagccatgtccaagttcttcacctctatccaaagaacttgatttgcatggattttggataaatcatttcagtatcatctccatcatatgcctgaccccttgctcccttcaatgctagaaaatcgagttggcaaaatggggtttgggcccctcagagccctgccctgcacccttgtacagtgtctgtgccatggatttcgtttttcttggggtactcttgatgtgaagataatttgcatattctattgtattatttggagttaggtcctcacttgggggaaaaaaaaaaaaaaaagccaagcaaaccaatggtgatcctctattttgtgatgatgctgtgacaataagtttgaacctttttttttgaaacagcagtcccagtattctcagagcatgtgtcagagtgttgttccgttaacctttttgtaaatactgcttgaccgtactctcacatgtggcaaaatatggtttggtttttcttttttttttttgaaagtgttttttcttcgtccttttggtttaaaaagtttcacgtcttggtgccttttgtgtgatgccccttgctgatggcttgacatgtgcaattgtgagggacatgctcacctctagccttaaggggggcagggagtgatgatttgggggaggctttgggagcaaaataaggaagagggctgagctgagcttcggttctccagaatgtaagaaaacaaaatctaaaacaaaatctgaactctcaaaagtctatttttttaactgaaaatgtaaatttataaatatattcaggagttggaatgttgtagttacctactgagtaggcggcgatttttgtatgttatgaacatgcagttcattattttgtggttctattttactttgtacttgtgtttgcttaaacaaagtgactgtttggcttataaacacattgaatgcgctttattgcccatgggatatgtggtgtatatccttccaaaaaattaaaacgaaaataaagtagctgcgattggg

SEQ ID NO: 321 - DNA, 2280 bp, Homo sapiens
ccgcccgccaccagctacgccccgtccgacgtgccctcgggggtcgcgctgttcctcaccatccctttcgccttcttcctgcccgagctgatatttgggttcttggtctggaccatggtagccgccacccacatagtataccccttgctgcaaggatgggtgatgtatgtctcgctcacctcgtttctcatctccttgatgttcctgttgtcttacttgtttggattttacaaaagatttgaatcctggagagttctggacagcctgtaccacgggaccactggcatcctgtacatgagcgctgccgtcctacaagtacatgccacgattgtttctgagaaactgctggacccaagaatttactacattaattcggcagcctcgttcttcgccttcatcgccacgctgctctacattctccatgccttcagcatctattaccactgatgcacaggcgccaggccaagggggaaatgctctttgaaagctccaattattggtccccaaaagcagcttccaacgtttgccatctggatgacaaacggaagatccactaaaacgtccacgggattaacagaacgtccttgcagactgagcgatgacaccacactttgtttggacatttaaattcactctgctgaataggaggaagcttttctttttcctgggaaaacaactgtctcttggaattatctgaccatgaacttgctcttctagacaactcacatcaaagccctcactccactaatggagaatcctagccccactaatgccaagtctgtttggggattttgcctcagctatgggcttccctagagtaggtctaggggaatactcagtctgatcttttttttgtttgttttattttgttttttttgagacggagtctcgctcttcctccaaggctggagtgcagtgacgcgatctccactcactgcaggctccgcctcccgggttcccgccattctcctgcctcagcctcccgagtagccgggactacaggcgcccaccaccatgcccggctaatttagttgtatttttagtagagatggggtttcaccgtattagccaggatggtctcgatctcctgacctcgtgatccgcccgcctcggcctcccaaagtgctgggattacaggcgtgagccaccgtgcccggcctgattctcttaaaattgaagaggtgctgccaaggccttcagatctaacgcagatgcatagaccttgttcctggtacttgttcagcctgtgctggggagccgtggtcccgagttccctgggaggctgacagggtcaagccaccctgcccaccaccctcccacttcccctcccctttcctctccagcattaggattcaagggaaatctgcatgaagccaattttgagggtagacgtgtggggaaaataaatcattatacagtaagacctggggcttgaggggtggggaatggggagggaagggcatagcctgctcctccatgagtctgacatctcggaaactgagcagctgccggacgcctgggtcaggaatccaagaccccacctcttaaggactggttcctcagaaagcaccctcagggaaaaaggtgaaaacattacatccgtggattctcctgccacaaccgcattggaagaaaaggctgccgcaacatctcagcgaggagtgaaggacccatgtcccaggaaccgcgctgcgccacctgcactcacccccctcacattctcttaagcacccggtggccctccgaggctggcggaatggtggtgcccacggggttgggcaagggctcaccaggacctcaacgggcaaagttgtgcacactaaaatatcaaatcaaggtgcttggttttaaagtaaatgtttttctaaagaaagctgtgttcttctgttgacccagacgaatagggcacagccctgtaactgcacgtgccttctgtcattgggaatgaaataaattattacgagaaagggacttgtcctaactggtttgaggccttacagttttgtatctacatttttcccctcctggggtttgcggggacagggacagaactacaggagtcatgggaaagaaaattctggcttcactactgctcactgctcactttctgatcactctgatactttttttttttttttttttttgcaacctgataccttgaaaagcttctatgtgtctctccttttgttgcctggcagctgtctaggatgatcactgattactatttactaagtagccacatgcaaataaaagttgtttggtaaaatggaaaaaaaaaaa

SEQ ID NO: 322 - DNA, 1398 bp, Homo sapiens
tagatggcaacctccctatctgcccgcaggtcatagaggcgacacgtagcgtcatctgaccctgaagcaaaggcatctccactccaaagttagacaaaatgccaggaatgttcttctctgctaacccaaaggaattgaaaggaaccactcattcacttctagacgacaaaatgcaaaaaaggaggccaaagacttttggaatggatatgaaagcatacctgagatctatgatcccacatctggaatctggaatgaaatcttccaagtccaaggatgtactttctgctgctgaagtaatgcaatggtctcaatctctggaaaaacttcttgccaaccaaactggtcaaaatgtctttggaagtttcctaaagtctgaattcagtgaggagaatattgagttctggctggcttgtgaagactataagaaaacagagtctgatcttttgccctgtaaagcagaagagatatataaagcatttgtgcattcagatgctgctaaacaaatcaatattgacttccgcactcgagaatctacagccaagaagattaaagcaccaacccccacgtgttttgatgaagcacaaaaagtcatatatactcttatggaaaaggactcttatcccaggttcctcaaatcagatatttacttaaatcttctaaatgacctgcaggctaatagcctaaagtgactggtccctggctgaagggaattaacagatagtatcaaggcacgaaggaatgtgccagtatggctccctgggtgaacagcttggccttttttgggtgtcttgacaggccaagaagaacaaatgactcagaatggattaacatgaaagttatccaggcgcagagttgaagaagcataagcaagacaaaaacagagagaccgcagaaggaggaagatactgtggtactgtcataaaaaacagtggagctctgtattagaaagcccctcagaactgggaaggccaggtaactctagttacacagaaactgtgactaaagtctatgaaactgattacaacaggctgtaagaatcaaagtcaactgacatctatgctacatattattatatagtttgtactgagctattgaagtcccattaacttaaagtatatgttttcaaattgccattgctactattgcttgtcggtgtattttattttattgtttttgactttggaagagatgaactgtgtatttaacttaagctattgctcttaaaaccagggatcagaatatatttgtaagttaaatcattggtgctaataataaatgtggattttgtattaaaatatatagaagcaatttctgtttacatgtccttgctacttttaaaaacttgcatttattcctcagattttaaaaataaataaataattcatttaaaaaaaaaaa

SEQ ID NO: 323 - DNA, 1316 bp, Homo sapiens
acttctacctgctcactcagaatcatttctgcaccaaccatggccacgtttgtggagctcagtaccaaagccaagatgcccattgtgggcctgggcacttggaagtctcctcttggcaaagtgaaagaagcagtgaaggtggccattgatgcaggatatcggcacattgactgtgcctatgtctatcagaatgaacatgaagtgggggaagccatccaagagaagatccaagagaaggctgtgaagcgggaggacctgttcatcgtcagcaagttgtggcccactttctttgagagaccccttgtgaggaaagcctttgagaagaccctcaaggacctgaagctgagctatctggacgtctatcttattcactggccacagggattcaagtctggggatgaccttttccccaaagatgataaaggtaatgccatcggtggaaaagcaacgttcttggatgcctgggaggccatggaggagctggtggatgaggggctggtgaaagcccttggggtctccaatttcagccacttccagatcgagaagctcttgaacaaacctggactgaaatataaaccagtgactaaccaggttgagtgtcacccatacctcacacaggagaaactgatccagtactgccactccaagggcatcaccgttacggcctacagccccctgggctctccggatagaccttgggccaagccagaagacccttccctgctggaggatcccaagattaaggagattgctgcaaagcacaaaaaaaccgcagcccaggttctgatccgtttccatatccagaggaatgtgattgtcatccccaagtctgtgacaccagcacgcattgttgagaacattcaggtctttgactttaaattgagtgatgaggagatggcaaccatactcagcttcaacagaaactggagggcctgtaacgtgttgcaatcctctcatttggaagactatcccttcaatgcagaatattgaggttgaatctcctggtgagattatacaggagattctctttcttcgctgaagtgtgactacctccactcatgtcccattttagccaagcttatttaagatcacagtgaacttagtcctgttatagacgagaatcgaggtgctgttttagacatttatttctgtatgttcaactaggatcagaatatcacagaaaagcatggcttgaataaggaaatgacaattttttccacttatctgatcagaacaaatgtttattaagcatcagaaactctgccaacactgaggatgtaaagatcaataaaacaaataataatcataaaaaaaaa

SEQ ID NO: 324 - protein, 200 aa, Homo sapiens
MAKGDPKKPKGKTSAYAFFVQTCREEHKKKNPEVPVNFAEFSKKCSERWKTVSGKEKSKFDEMAKADKVRYDREMKDYGPAKGGKKKKDPNAPKRPPSGFFLFCSEFRPKIKSTNPGISIGDVAKKLGEMWNNLNDSEKQPYITKAAKLKEKYEKDVADYKSKGKFDGAKGPAKVARKKVEEEDEEQEEEEEEEEEEEDE

SEQ ID NO: 325 - protein, 263 aa, Homo sapiens
MFRNQYDNDVTVWSPQGRIHQIEYAMEAVKQGSATVGLKSKTHAVLVALKRAQSELAAHQKKILHVDNHIGISIAGLTADARLLCNFMRQECLDSRFVFDRPLPVSRLVSLIGSKTQIPTQRYGRRPYGVGLLIAGYDDMGPHIFQTCPSANYFDCRAMSIGARSQSARTYLERHMSEFMECNLNELVKHGLRALRETLPAEQDLTTKNVSIGIVGKDLEFTIYDDDDVSPFLEGLEERPQRKAQPAQPADEPAEKADEPMEH

SEQ ID NO: 326 - protein, 539 aa, Homo sapiens
MPENVAPRSGATAGAAGGRGKGAYQDRDKPAQIRFSNISAAKAVADAIRTSLGPKGMDKMIQDGKGDVTITNDGATILKQMQVLHPAARMLVELSKAQDIEAGDGTTSVVIIAGSLLDSCTKLLQKGIHPTIISESFQKALEKGIEILTDMSRPVELSDRETLLNSATTSLNSKVVSQYSSLLSPMSVNAVMKVIDPATATSVDLRDIKIVKKLGGTIDDCELVEGLVLTQKVSNSGITRVEKAKIGLIQFCLSAPKTDMDNQIVVSDYAQMDRVLREERAYILNLVKQIKKTGCNVLLIQKSILRDALSDLALHFLNKMKIMVIKDIEREDIEFICKTIGTKPVAHIDQFTADMLGSAELAEEVNLNGSGKLLKITGCASPGKTVTIVVRGSNKLVIEEAERSIHDALCVIRCLVKKRALIAGGGAPEIELALRLTEYSRTLSGMESYCVRAFADAMEVIPSTLAENAGLNPISTVTELRNRHAQGEKTAGINVRKGGISNILEELVVQPLLVSVSALTLATETVRSILKIDDVVNTR

SEQ ID NO: 327 - protein, 144 aa, Homo sapiens
MAFTFAAFCYMLALLLTAALIFFAIWHIIAFDELKTDYKNPIDQCNTLNPLVLPEYLIHAFFCVMFLCAAEWLTLGLNMPLLAYHIWRYMSRPVMSGPGLYDPTTIMNADILAYCQKEGWCKLAFYLLAFFYYLYGMIYVLVSS

SEQ ID NO: 328 - protein, 138 aa, Homo sapiens
MPNFSGNWKIIRSENFEELLKVLGVNVMLRKIAVAAASKPAVEIKQEGDTFYIKTSTTVRTTEINFKVGEEFEEQTVDGRPCKSLVKWESENKMVCEQKLLKGEGPKTSWTRELTNDGELILTMTADDVVCTRVYVRE

SEQ ID NO: 329 - protein, 346 aa, Homo sapiens
MFLSILVALCLWLHLALGVRGAPCEAVRIPMCRHMPWNITRMPNHLHHSTQENAILAIEQYEELVDVNCSAVLRFFFCAMYAPICTLEFLHDPIKPCKSVCQRARDDCEPLMKMYNHSWPESLACDELPVYDRGVCISPEAIVTDLPEDVKWIDITPDMMVQERPLDVDCKRLSPDRCKCKKVKPTLATYLSKNYSYVIHAKIKAVQRSGCNEVTTVVDVKEIFKSSSPIPRTQVPLITNSSCQCPHILPHQDVLIMCYEWRSRMMLLENCLVEKWRDQLSKRSIQWEERLQEQRRTVQDKKKTAGRTSRSNPPKPKGKPPAPKPASPKKNIKTRSAQKRTNPKRV

SEQ ID NO: 330 - protein, 826 aa, Homo sapiens
MEGAGGANDKKKISSERRKEKSRDAARSRRSKESEVFYELAHQLPLPHNVSSHLDKASVMRLTISYLRVRKLLDAGDLDIEDDMKAQMNCFYLKALDGFVMVLTDDGDMIYISDNVNKYMGLTQFELTGHSVFDFTHPCDHEEMREMLTHRNGLVKKGKEQNTQRSFFLRMKCTLTSRGRTMNIKSATWKVLHCTGHIHVYDTNSNQPQCGYKKPPMTCLVLICEPIPHPSNIEIPLDSKTFLSRHSLDMKFSYCDERITELMGYEPEELLGRSIYEYYHALDSDHLTKTHHDMFTKGQVTTGQYRMLAKRGGYVWVETQATVIYNTKNSQPQCIVCVNYVVSGIIQHDLIFSLQQTECVLKPVESSDMKMTQLFTKVESEDTSSLFDKLKKEPDALTLLAPAAGDTIISLDFGSNDTETDDQQLEEVPLYNDVMLPSPNEKLQNINLAMSPLPTAETPKPLRSSADPALNQEVALKLEPNPESLELSFTMPQIQDQTPSPSDGSTRQSSPEPNSPSEYCFYVDSDMVNEFKLELVEKLFAEDTEAKNPFSTQDTDLDLEMLAPYIPMDDDFQLRSFDQLSPLESSSASPESASPQSTVTVFQQTQIQEPTANATTTTATTDELKTVTKDRMEDIKILIASPSPTHIHKETTSATSSPYRDTQSRTASPNRAGKGVIEQTEKSHPRSPNVLSVALSQRTTVPEEELNPKILALQNAQRKRKMEHDGSLFQAVGIGTLLQQPDDHAATTSLSWKRVKGCKSSEQNGMEQKTIILIPSDLACRLLGQSMDESGLPQLTSYDCEVNAPIQGSRNLLQGEELLRALDQVN

SEQ ID NO: 331 - protein, 92 aa, Homo sapiens
MAYRGQGQKVQKVMVQPINLIFRYLQNRSRIQVWLYEQVNMRIEGCIIGFDEYMNLVLDDAEEIHSKTKSRKQLGRIMLKGDNITLLQSVSN

SEQ ID NO: 332 - protein, 235 aa, Homo sapiens
MDPARPLGLSILLLFLTEAALGDAAQEPTGNNAEICLLPLDYGPCRALLLRYYYDRYTQSCRQFLYGGCEGNANNFYTWEACDDACWRIEKVPKVCRLQVSVDDQCEGSTEKYFFNLSSMTCEKFFSGGCHRNRIENRFPDEATCMGFCAPKKIPSFCYSPKDEGLCSANVTRYYFNPRYRTCDAFTYTGCGGNDNNFVSREDCKRACAKALKKKKKMPKLRFASRIRKIRKKQF

SEQ ID NO: 333 - protein, 291 aa, Homo sapiens
MQRARPTLWAAALTLLVLLRGPPVARAGASSGGLGPVVRCEPCDARALAQCAPPPAVCAELVREPGCGCCLTCALSEGQPCGIYTERCGSGLRCQPSPDEARPLQALLDGRGLCVNASAVSRLRAYLLPAPPAPGNASESEEDRSAGSVESPSVSSTHRVSDPKFHPLHSKIIIIKKGHAKDSQRYKVDYESQSTDTQNFSSESKRETEYGPCRREMEDTLNHLKFLNVLSPRGVHIPNCDKKGFYKKKQCRPSKGRKRGFCWCVDKYGQPLPGYTTKGKEDVHCYSMQSK

SEQ ID NO: 334 - protein, 582 aa, Homo sapiens
ESKGASSCRLLFCLLISATVFRPGLGWYTVNSAYGDTIIIPCRLDVPQNLMFGKWKYEKPDGSPVFIAFRSSTKKSVQYDDVPEYKDRLNLSENYTLSISNARISDEKRFVCMLVTEDNVFEAPTIVKVFKQPSKPEIVSKALFLETEQLKKLGDCISEDSYPDGNITWYRNGKVLHPLEGAVVIIFKKEMDPVTQLYTMTSTLEYKTTKADIQMPFTCSVTYYGPSGQKTIHSEQAVFDIYYPTEQVTIQVLPPKNAIKEGDNITLKCLGNGNPPPEEFLFYLPGQPEGIRSSNTYTLTDVRRNATGDYKCSLIDKKSMIASTAITVHYLDLSLNPSGEVTRQIGDALPVSCTISASRNATVVWMKDNIRLRSSPSFSSLHYQDAGNYVCETALQEVEGLKKRESLTLIVEGKPQIKMTKKTDPSGLSKTIICHVEGFPKPAIQWTITGSGSVINQTEESPYINGRYYSKIIISPEENVTLTCTAENQLERTVNSLNVSAISIPEHDEADEISDENREKVNDQAKLIVGIVVGLLLAALVAGVVYWLYMKKSKTASKHVNKDLGNMEENKKLEENNHKTEA

SEQ ID NO: 335 - protein, 709 aa, Homo sapiens
MAEVEDQAARDMKRLEEKDKERKNVKGIRDDIEEEDDQEAYFRYMAENPTAGVVQEEEEDNLEYDSDGNPIAPTKKIIDPLPPIDHSEIDYPPFEKNFYNEHEEITNLTPQQLIDLRHKLNLRVSGAAPPRPGSSFAHFGFDEQLMHQIRKSEYTQPTPIQCQGVPVALSGRDMIGIAKTGSGKTAAFIWPMLIHIMDQKELEPGDGPIAVIVCPTRELCQQIHAECKRFGKAYNLRSVAVYGGGSMWEQAKALQEGAEIVVCTPGRLIDHVKKKATNLQRVSYLVFDEADRMFDMGFEYQVRSIASHVRPDRQTLLFSATFRKKIEKLARDILIDPIRVVQGDIGEANEDVTQIVEILHSGPSKWNWLTRRLVEFTSSGSVLLFVTKKANAEELANNLKQEGHNLGLLHGDMDQSERNKVISDFKKKDIPVLVATDVAARGLDIPSIKTVINYDVARDIDTHTHRIGRTGRAGEKGVAYTLLTPKDSNFAGDLVRNLEGANQHVSKELLDLAMQNAWFRKSRFKGGKGKKLNIGGGGLGYRERPGLGSENMDRGNNNVMSNYEAYKPSTGAMGDRLTAMKAAFQSQYKSHFVAASLSNQKAGSSAAGASGWTSAGSLNSVPTNSAQQGHNSPDSPVTSAAKGIPGFGNTGNISGAPVTYPSAGAQGVNNTASGNNSREGTGGSNGKRERYTENRGSSPSQSRRDWQSA

SEQ ID NO: 336 - protein, 480 aa, Homo sapiens
MIRAAPPPLFLLLLLLLLLVSWASRGEAAPDQDEIQRLPGLAKQPSFRQYSGYLKSSGSKHLHYWFVESQKDPENSPVVLWLNGGPGCSSLDGLLTEHGPFLVQPDGVTLEYNPYSWNLIANVLYLESPAGVGFSYSDDKFYATNDTEVAQSNFEALQDFFRLFPEYKNNKLFLTGESYAGIYIPTLAVLVMQDPSMNLQGLAVGNGLSSYEQNDNSLVYFAYYHGLLGNRLWSSLQTHCCSQNKCNFYDNKDLECVTNLQEVARIVGNSGLNIYNLYAPCAGGVPSHFRYEKDTVVVQDLGNIFTRLPLKRMWHQALLRSGDKVRMDPPCTNTTAASTYLNNPYVRKALNIPEQLPQWDMCNFLVNLQYRRLYRSMNSQYLKLLSSQKYQILLYNGDVDMACNFMGDEWFVDSLNQKMEVQRRPWLVKYGDSGEQIAGFVKEFSHIAFLTIKGAGHMVPTDKPLAAFTMFSRFLNKQPY

SEQ ID NO: 337 - protein, 543 aa, Homo sapiens
MAAAKAEMQLMSPLQISDPFGSFPHSPTMDNYPKLEEMMLLSNGAPQFLGAAGAPEGSGSNSSSSSSGGGGGGGGGSNSSSSSSTFNPQADTGEQPYEHLTAESFPDISLNNEKVLVETSYPSQTTRLPPITYTGRFSLEPAPNSGNTLWPEPLFSLVSGLVSMTNPPASSSSAPSPAASSASASQSPPLSCAVPSNDSSPIYSAAPTFPTPNTDIFPEPQSQAFPGSAGTALQYPPPAYPAAKGGFQVPMIPDYLFPQQQGDLGLGTPDQKPFQGLESRTQQPSLTPLSTIKAFATQSGSQDLKALNTSYQSQLIKPSRMRKYPNRPSKTPPHERPYACPVESCDRRFSRSDELTRHIRIHTGQKPFQCRICMRNFSRSDHLTTHIRTHTGEKPFACDICGRKFARSDERKRHTKIHLRQKDKKADKSVVASSATSSLSSYPSPVATSYPSPVTTSYPSPATTSYPSPVPTSFSSPGSSTYPSPVHSGFPSPSVATTYSSVPPAFPAQVSSFPSSAVTNSFSASTGLSDMTATFSPRTIEIC

SEQ ID NO: 338 - protein, 148 aa, Homo sapiens
PPATSYAPSDVPSGVALFLTIPFAFFLPELIFGFLVWTMVAATHIVYPLLQGWVMYVSLTSFLISLMFLLSYLFGFYKRFESWRVLDSLYHGTTGILYMSAAVLQVHATIVSEKLLDPRIYYINSAASFFAFIATLLYILHAFSIYYH

SEQ ID NO: 339 - protein, 196 aa, Homo sapiens
MPGMFFSANPKELKGTTHSLLDDKMQKRRPKTFGMDMKAYLRSMIPHLESGMKSSKSKDVLSAAEVMQWSQSLEKLLANQTGQNVFGSFLKSEFSEENIEFWLACEDYKKTESDLLPCKAEEIYKAFVHSDAAKQINIDFRTRESTAKKIKAPTPTCFDEAQKVIYTLMEKDSYPRFLKSDIYLNLLNDLQANSLK

SEQ ID NO: 340 - protein, 316 aa, Homo sapiens
MATFVELSTKAKMPIVGLGTWKSPLGKVKEAVKVAIDAGYRHIDCAYVYQNEHEVGEAIQEKIQEKAVKREDLFIVSKLWPTFFERPLVRKAFEKTLKDLKLSYLDVYLIHWPQGFKSGDDLFPKDDKGNAIGGKATFLDAWEAMEELVDEGLVKALGVSNFSHFQIEKLLNKPGLKYKPVTNQVECHPYLTQEKLIQYCHSKGITVTAYSPLGSPDRPWAKPEDPSLLEDPKIKEIAAKHKKTAAQVLIRFHIQRNVIVIPKSVTPARIVENIQVFDFKLSDEEMATILSFNRNWRACNVLQSSHLEDYPFNAEY

SEQ ID NO: 341 - DNA, 422 bp, Homo sapiens
  misc_feature 6, 10, 13, 15, 29: n = A,T,C or G
gatganattnttncnagagagaggaagangctattcagttggatgggattaaatgcatcacaaataagagaacttagagagaagtcggaaaagtttgccttccaagcccgaagttaacagaatgatgaaacttatcatcaattcattgtataaaaataaagagattttcctgagagaactgatttcaaatgcttctgatgctttagataagataaggctaatatcactgactgatgaaaatgctctttctggaaatgaggaactaacagtcaaaattaagtgtgataaggagaagacctgctgcatgtcacagacaccggtgtaggaatgaccagagaagagttggttaaaaaccttggtaccatagccaaatctgggacaagcgagtttttaaacaaaatgactgaagcacaggaagatgg

SEQ ID NO: 342 - DNA, 472 bp, Homo sapiens
  misc_feature 109: n = A,T,C or G
ctggagaaggtgtgcaggggaaaccctgctgatgtcaccgaggccaggttgtctttctactcgggacactcttcctttgggatgtactgcatggtgttcttggcgctgnatgtgcaggcacgactctgttggaagtgggcacggctgctgcgacccacagtccagttcttcctggtggcctttgccctctacgtgggctacacccgcgtgtctgattacaaacaccactggagcgatgtccttgttggcctcctgcagggggcactggtggctgccctcactgtctgctacatctcagacttcctcaaagcccgacccccacagcactgtctgaaggaggaggagctggaacggaagcccagcctgtcactgacgttgaccctgggcgaggctgaccacaaccactatggatacccgcactcctcctcctgaggccggaccccgcccaggcagggagctactgtgagtccag

SEQ ID NO: 343 - DNA, 139 bp, Homo sapiens
gtcctgggccttccccttccctcaagccagggctcctcctcctgtcgtgggctcattgtgaccactggcctctctacagcacggcctgtggcctgttcaaggcagaaccacgacccttgactcccgggtggggaggtgg

SEQ ID NO: 344 - DNA, 235 bp, Homo sapiens
ctgcgggctcagcacagtagacatgactgggatccccaccttggacaacctccagaagggagtccaatttgctctcaagtaccagtcgctgggccagtgtgtttacgtgcattgtaaggctgggcgctccaggagtgccactatggtggcagcatacctgattcaggtgcacaaatggagtccagaggaggctgtaagagccatcgccaagatccggtcatacatccacatcagg

SEQ ID NO: 345 - DNA, 458 bp, Homo sapiens
ctgtaaggtgctattcagtcctgtgacccttattttggaatgctcttcattactgttgctctgttttgtgacttcctgggaaaccgcctactttggtgtggtgtcaccttgagctgtgcacataggacaccagttttgacttaacctaacaggcagtttttatctctagctttttcaagccaggtattgagcagtttcttggccaatggcctgagaaaccacctgtccctgtcaaggggtgattttattggttttaagtggggaagtaatcccatgtacttatttcttaaatacctaggaagttcttcttggtggctcctcttggccctcccctctttctcccccaacccaccatcctgcaaggcaaggaatggcctctccctccacagaggcaacggctgcagagggagcactgtggctgccatcccagttcctcttcaaagccaaacagacacgcg

SEQ ID NO: 346 - DNA, 525 bp, Homo sapiens
  misc_feature 41, 42, 47, 48, 49, 161, 316, 324, 326, 327, 379, 455, 509: n = A,T,C or G
ccagagcacaacgcctcaccatggactggacctggaggatnntcttnnnggtggcagcagccacaggtgtccactcccaagcccaacttgtgcagtctggggctgaggagaagaagcctggggcctcagtgactatttcttgtaaggcttctggatatatncttactaaatatactttacattgggtgcgccaggccccccccggacaaagacctgaatgggtgggatggatcaacactggcattgataccgttaaatattcacagaagtttcaggacagagtctccattacctgggactcatccgcgaccacagnctacctgnanntgagtagcctggaatccgaagacacggctgtgtattactgtgcgagacttanggcccgttcgctgtggtgggacttaatgacgcttttgacatctggggccaagggacagtggtcaccgtctcttcanggagtgcattcgccccaacccttttccccctctctcctgtgaagaattccccgncggatacgagcagcgt

SEQ ID NO: 347 - DNA, 423 bp, Homo sapiens
ccagacgctgacttgtttctgagtccttaagcaggaaggatttgaaatcctggagcttggcagtcttgctcttcacctctaagccaatgttgaccccttcatctataaagtccacaactctccggaagtcatcctcacggaactgtcgagaagttaaggctggggccccaagccgcaggccgcccggtgtgatggcacttcggtctccaggacaggtgttcttgttggcagtgatggatacaagctctagcacccgctcagcccgagctccatccaggcccttgggccgcaggtccaccagcaccaggtggttgtcagtaccacctgataccagtgagtagcctcgctctagcagggcatctgccatggcccgagcattcttcagaacctgcagggagtactcccggaacatgggggtgcagg

SEQ ID NO: 348 - DNA, 513 bp, Homo sapiens
cctctaggcctgatgctctcagaggcaatagaagaaaagtaaaaggaaggtctcacttcacagacaatgaaaccctcctaaccctcttccccactacccacaactccctacactgccaatctaaataaaaagaggacaatgcatgagtgtgagatacacatacacacacacacatacacacacacacacgcacagcttcctttcagccaaagaactgcaaaatccttccccggaaggaggacaactggcaacaccaatcaaggcttggtggtctaaggtgatggctggaatcatgtgagactggtaaaaatccagggagaaaatgtttcaccttcagctcattcccaagtctctatgaagcccgccccacttccacataggggaactgtggctctgggggcagcctctgcagctactcagaataggtgggaggaggggctggctttgaggctgccttagccatgaggctctttgcctaggaatagctggagatgggagctgcagggggctcag

SEQ ID NO: 349 - DNA, 231 bp, Homo sapiens
ccttatttctcttgtcctttcgtacagggaggaatttgaagtagatagaaaccgacctggattactccggtctgaactcagatcacgtaggactttaatcgttgaacaaacgaacctttaatagcggctgcaccatcgggatgtcctgatccaacatcgaggtcgtaaaccctattgttgatatggactctagagtaggattgcgctgttatccctagggtaacttgttcc

SEQ ID NO: 350 - DNA, 341 bp, Homo sapiens
ctgcccaagggcgttcgtaacgggaatgccgaagcgtgggaaaaagggagcggtggcggaagacggggatgagctcaggacagagccagaggccaagaagagtaagacggccgcaaagaaaaatgacaaagaggcagcaggagagggcccagccctgtatgaggaccccccagatcagaaaacctcacccagtggcaaacctgccacacccaagatctgctcttggaatgtggatgggcttcgagcctggattaagaagaaaggattagattgggtaaaggaagaagccccagatatactgtgccttcaagagaccaaatgttcagagaacaaactaccag

SEQ ID NO: 351 - DNA, 256 bp, Homo sapiens
ggcgttggggacggttgtaggacgtggctctttattcgtgagttttccatttacctccgctgaacctagagcttcagacgccctatggcgtccgcctcgacccaaccggcggccttgagcgctgagcaagcaaaggtggtcctcgcggaggtgatccaggcgttctccgccccggagaatgcagtgcgcatggacgaggctcgggataacgcctgcaacgacatgggtaagatgctgcaattcgtgctgcccgtgg

SEQ ID NO: 352 - DNA, 368 bp, Homo sapiens
  misc_feature 21: n = A,T,C or G
cctttcttgtaagtgaagaanaaggaatgcagcaaagaagagttcgacattggagtccttagttccatcaggatcccattcgcagcctttagcatcatgtagaagcaaactgcacctatggctgagataggtgcaatgacctacaagattttgtgttttctagctgtccaggaaaagccatcttcagtcttgctgacagtcaaagagcaagtgaaaccatttccagcctaaactacataaaagcagccgaaccaatgattaaagacctctaaggctccataatcatcattaaatatgcccaaactcattgtgactttttattttatatacaggattaaaatcaacattaaatcatcttatttacatgg

SEQ ID NO: 353 - DNA, 368 bp, Homo sapiens
ctgaggggtggcagtaagcaatgaggatgggctataaagctgttaactggctaagggccatccttgggcaggcatttcagacacatctgtagagagggcagtagcatctccgataggccagctctgaaggaagcttaatgcttaatacagtcacactgcataaattagcttagaatgctctcttgggtaaaaaatattaatagtgtatatgcacttgaagagcaaaattcctcaagaaaaaaagtttaatagcaaggagtttccatcagtcccggtctttgtgaggattaccacaacaaacacttaaaaggatacaacaggtacttattaaatgctgccttgccttttacctcttccttttttttttt

SEQ ID NO: 354 - DNA, 380 bp, Homo sapiens
ccatggcttctcacccagacagtctttctgggcaacttggggaagcccctgttctgctcaagtctcaccccatggaagaggtgggggaagggggccttggtttttcaggaagacaggttggagagcacgagtcactacaaagcagtaaaagtgaatggtgtctccaggggctgggtccagaacaccacggagagccccagccataaaggtgtgttccgcctctggcctgcaggaatctctttgaatctctttgattggtggctccaagagcaatgggaagtcaacagccaggaggctggactgggttccctgggaccccgaggtcccagagctgctgggcagtggttgtcggcaaagaagaaaggtccaagagggtcagg

SEQ ID NO: 355 - DNA, 347 bp, Homo sapiens
ccagtggaggggtgggggtatcgatcccgccgggggctggcttggttgctggtgccctgagcccttctctgcccgcctgggtgttgccttcactgatggaggtaggcgtccagccagatgtcaccagacttcttcggggacctgacgatgtccaccagcgcggtgaggaagggcttcacttcgtagctgaggccgtgcttggcacacagcgacttgaccagcggggccacccggctgtagttgtgtctcggcatcctggggaagaggtggtgctcgatctggaagttgaggtgcccgctgaaccagttggtgaaaagtgagggctccacgttgcaggtggctgccag

SEQ ID NO: 356 - DNA, 157 bp, Homo sapiens
cctggagctgctgaagactgctattgggaaagctggctacactgataaggtggtcatcggcatggacgtagcggcctccgagttcttcaggtctgggaagtatgacctggacttcaagtctcccgatgaccccagcaggtacatctcgcctgaccag

SEQ ID NO: 357 - DNA, 323 bp, Homo sapiens
ccatacagggctgttgcccaggccctagaggtcactcctcgtaccctgatccagaactgtggggccagcaccatccgtctacttacctcccttcgggccaagcacacccaggagaactgtgagacctggggtgtaaatggtgagacgggtactttggtggacatgaaggaactgggcatatgggagccattggctgtgaagctgcagacttataagacagcagtggagacggcagttctgctactgcgaattgatgacatcgtttcaggccacaaaaagaaaggcgatgaccagagccggcaaggcggggctcctgatgctgg

SEQ ID NO: 358 - DNA, 555 bp, Homo sapiens
aaaaggtttctaaaacatgacggaggttgagatgaagcttcttcatggagtaaaaaatgtatttaaaagaaaattgagagaaaggactacagagccccgagttaataccaatagaagggcaatgcttttagattaaaatgaaggtgacttaaacagcttaaagtttagtttaaaagttgtaggtgattaaaataatttgaaggcgatcttttaaaaagagattaaaccgaaggtgattaaaagaccttgaaatccatgacgcagggagaattgcgtcatttaaagcctagttaacgcatttactaaacgcagacgaaaatggaaagattaattgggagtggtaggatgaaacaatttggagaagatagaagtttgaagtggaaaactggaagacagaagtacgggaaggcgaagaaaagaatagagaagatagggaaattagaagataaaaacatacttttagaagaaaaaagataaatttaaacctgaaaagtaggaagcagaagaaaaaagacaagctaggaaacaaaaagctaagggcaaaatgtacaccac

SEQ ID NO: 359 - DNA, 549 bp, Homo sapiens
ctgccaggctgaaaagaagcctcagctcccacaccgccctcctcaccgcccttcctcggcagtcacttccactggtggaccacgggcccccagccctgtgtcggccttgtctgtctcagctcaaccacagtctgacaccagagcccacttccatcctctctggtgtgaggcacagcgagggcagcatctggaggagctctgcagcctccacacctaccacgacctcccagggctgggctcaggaaaaaccagccactgctttacaggacagggggttgaagctgagccccgcctcacacccacccccatgcactcaaagattggattttacagctacttgcaattcaaaattcagaagaataaaaaatgggaacatacagaactctaaaagatagacatcagaaattgttaagttaagctttttcaaaaaatcagcaattccccagcgtagtcaagggtggacactgcacgctctggcatgatgggatggcgaccgggcaagctttcttcctcgagatgctcttgctgcttgagagctattgctttggt

SEQ ID NO: 360 - DNA, 289 bp, Homo sapiens
tttaaattttactagtgttacttaatgtatattctaaaaagagaatgcagtaactaatgccctaaatgtttgatctctgtttgtcattactttttcaaaattatttttttctgtaaagtataatatataaaacttcttgcttaaattgaatttctatattagtggttaattgcagtttattaaagggatcattatcagtaatttcatagcaactgttctagtgttttgtgtttttaaaacagaattaggaatttgagatatctgattatatttttcatatgaatcacag

SEQ ID NO: 361 - DNA, 311 bp, Homo sapiens
ctgttcagtatggcaaagggcagacttactccttcatccactctgctgccttgatgaggtgaacacactggaataagatggagggcaggatacctgccaaagcctgaggaatgagatgatctgaaacaattgggcaaaggctggacatttcaaaaagctgacttccaactgcagtttatgggtatagaatttgatgcttccctcaagtcctgactgctctttctgaggcagccaggctaggccaagaaatgagctgctccagcttctccagagcacagcagcctcccagggcctgtcagcatctgcagcag

SEQ ID NO: 362 - DNA, 496 bp, Homo sapiens
  misc_feature 14: n = A,T,C or G
ccagtttctaaaanaatgcacatttaaagagaagcatctaccacggctttaaaacaaaacaactctgagatgaacaatatgtgttatactcagagattaacaatctcaatcatacatactgattctttcagacatttaataaccactacatttttttgcattaatgaagtttgactatatgtgtaaagggactaaatatttttgcaacagcctgttctttgttcattcttttctggatagcgtgtcctctgtattgcggtagatttatacattctgttgcctaaatatgtgtgtaaaatgagctgataaactggagtactacttaaaaaaaagtctgtgatttataagatgcatatgctttctatgtgaatataagcttgtgcacaatgtttaaaagaaaaacaatgaattagaagagatcccccgtcccccagtctgacatatttcatacagaatgtttaaaagaaaaactctgctagtcttggcaaacatttgg

SEQ ID NO: 363 - DNA, 673 bp, Homo sapiens
  misc_feature 16: n = A,T,C or G
ccaagagggagataanacaaacttctcaaacaaaaagaaaagaaaaacgaatgattcatctgctttaatcagtgtgattaatgcagcacccattgccccgggaaccgtttctgctgtactatctggatactaaaatgttacggaagtagctctttgttctccctcactctgcccttagttaatagaaattcagactcgccaagtaaggctttgtgcatagtgtcttcatgtcgcgtatagttgagcgcgttcttagcagttggcttcatggacagctcattagtgttttgacttttcttacccagcgttaattgaattcttgcttttagacaacttcctttttgtagtggtgaaccttgccctttagtacagttcaagtgaatctggataattgttcatctttgctttagcttagataccatgtagtggtctgtggctacaggaagctggttctgtctgcttccacagtctgcttaaaaaactgtctgacttcgtgaatatagagaccaagtttaccacttctgatgaagagaccaattaagattcattcctcattctgtttctttccagtgggagaagagtccccatgaaataagatgaaactgattccatgcactagtacatgtaggcttctcccttgcgcaaagcttaacaatttgtaggaaactttggg

SEQ ID NO: 364 - DNA, 495 bp, Homo sapiens
  misc_feature 13: n = A,T,C or G
ccaaatgtttgcncaagactagcagagtttttcttttaaacattctgtatgaaatatgtcagactgggggacgggggatctcttctaattcattgtttttcttttaaacattgtgcacaagcttatattcacatagaaagcatatacatcttataaatcacagacttttttttaagtagtactccagtttatcagctcattttacacacatatttaggcaacagaatgtataaatctaccgcaatacagaggacacactatccagaaaagaatgaacaaagaacaggctgttgcaaaaatatttagtccctttacacatatagtcaaacttcattaatgcaaaaaatgtagtggttattaaatgtctgaaagaatcagtatgtatgattgagattgttaatctctgagtataacacatattgttcatctcagagttgttttgttttaaagccgtggtagatgcttctctttaaatgtgcattttttagaaactgg

SEQ ID NO: 365 - DNA, 291 bp, Homo sapiens
aactgacaagcccttgcgcctgcctctccaggatgtctacaaaattggtggtattggtactgttcctgttggcccgagtggagactggtgttctcaaacccggtatggtggtcacctttgctccagtcaacgttacaacggaagtaaaatctgtcgaaatgcaccatgaagctttgagtgaagctcttcctggggacaatgtgggcttcaatgtcaagaatgtgtctgtcaaggatgttcgtcgtggcaacgttgctggtgacagcaaaaatgacccaccaatggaagcag

SEQ ID NO: 366 - DNA, 277 bp, Homo sapiens
ctggatggtgcctcagaaggtgcattctgcttctgcaggggcttgaaacaccaaggcactccagggatcctggagtcaaagcagcagccccggttgttgcactccttgggggtgacatgggggtagcccgcagtccaccctgtccttggctggcacggcacactggtttgcagacaggcccacgtactcctcagcagagctggaggacaagcaaggccaggaccagccccagcatgcagagcgctctggcagccatgaccaccgtgggctccgggac

SEQ ID NO: 367 - DNA, 311 bp, Homo sapiens
ccagagctgcggggcctcagtacacggagctgttccggatgccacagcacagcaccatgctcaggatcatctcgaagatcatgatcacagcgaccacgatggcagcaatgccgatgaggtacagcttcccggagaagaggtcatcgatcttctggtggcagtcctccttgaagaggttgctgatgatgttgctgcccgagggacacaaattgttcttgagcactgaggtggtcaaagcagtcagtgtgctggagccacagcagtcaagcgtctcgtggaaggtcttcaccacagccttggcgttgttggcg

SEQ ID NO: 368 - DNA, 384 bp, Homo sapiens
ccaaaggggtctctagctgctgctctgctgctcctgctcatggatgagtttggcgatggggccggtgatgccgcctatcaaggtccagtactcatcgaagctgatgcgcccatcaggattggcatccaggttctggatgagcttatccgcagccttccggttccctgtgtccgacagcatgtggttcagctctttctggagcatctcgcggaagctgctcttgctgatcttgttcttgaccaggctgtacctagacacatatttgtagaagttttccaccaggacaatgactgccttctccagctccgtgtagcaagtctgacatctccctgcttcgcctgctggcggggcctaaggcgggggccaagcccagttacagcccag

SEQ ID NO: 369 - DNA, 216 bp, Homo sapiens
ccaagtgccaggtggctttcagcagcttcctacgatcagccgaagaaagcagaagctctggaggctgccatcgagaacctcaatgaagccaagaactattttgcaaaggttgactgcaaagagcgcatcagggacgtcgtttacttccaggccagactctaccataccctggggaagacccaggagaggaaccggtgtgcgatgctcttccggcag

SEQ ID NO: 370 - DNA, 561 bp, Homo sapiens
ctggctccttcttttgtggtcgtttgggggatgggctggtttggggtttaggtgcagagaatggtttggggccactgcgtactggaccactctgagccttcagggcagggttcttgtgagtcttcatgtcatcagatacatgtttcagggcatgtgtaatgctctccccctgattaatctgcgcgaacagtgctgagcgggaagcagactcatctgagcctgaactggtagagactgggggaggaggggggcctggtggagggggaggaggacctgatccggcagagggtccagatggcagtccgctcagttcttttgccacaggccccgttttgctccaggccagtccggtggtatggaactccttaatgtaagcctgcagctctgtccatatacttaaataagctttgacccagtctacatgcttcttatccacatctttgtactctttgaggactcggtttgtataaaacatggcggcatcattcatttctttcgcataagggccaggcttgggagccatagccacccagcccagggcctggatactttcgctgacag

SEQ ID NO: 371 - DNA, 518 bp, Homo sapiens
cccacttccatcgctctctggtgtgaggcacagcgagggcagcatctggaggagctctgcagcctccacacctaccacgacctcccagggctgggctcaggaaaaaccagccactgctttacaggacagggggttgaagctgagccccgcctcacacccacccccatgcactcaaagattggattttacagctacttgcaattcaaaattcagaagaataaaaaatgggaacatacagaactctaaaagatagacatcagaaattgttaagttaagctttttcaaaaaatcagcaattccccagcgtagtcaagggtggacactgcacgctctggcatgatgggatggcgaccgggcaagctttcttcctcgagatgctctgctgcttgagagctattgctttgttaagatataaaaaggggtttctttttgtctttctgtaaggtggacttccagcttttgattgaaagtcctagggtgattctatttctgctgtgatttatctgctgaaagctcag

SEQ ID NO: 372 - DNA, 335 bp, Homo sapiens
ctggaggctgggtgcaccctgcccagatccacacctgtaccccggcggaaaggctcatgggcattgaagacggtggtgaaaaagccaaagggaaaagcaccaacaccaaatgagaagtggaagcccccggtatcaccaaatggctggaatccccctctgctctccggagctggtctctggccctgggggcggggtggagtttttaatctgggatcctggggcttctggctccctcgcccataaagcgggacaaccttctctctgctgatcccagctttacatactggacactcttgccgttctggccgtgtctccagccactgatgaagacatgg

SEQ ID NO: 373 - DNA, 467 bp, Homo sapiens
ccactagctgaatcttgacatggaaggttttagctaatgccaagtggagatgcagaaaatgctaagttgacttaggggctgtgcacaggaactaaaaggcaggaaagtactaaatattgctgagagcatccaccccaggaaggactttaccttccaggagctccaaactggcaccacccccagtgctcacatggctgactttatcctccgtgttccatttggcacagcaagtggcagtgtctccaccacctatgatggtgatgcagcccctagaagtggctttcaccacctcatccatgagagctttggttccccgggcaaaagcttcccattcaaatacccccacaggaccattccacacaatctgcttagcccgagtgacagcctcagcatacttcttgctgctttcaggaccacagtccaagcccatccagccagcaggtacgccagaagccacagtggcttgg

SEQ ID NO: 374 - DNA, 284 bp, Homo sapiens
tttccgtaaaagcgtgtaacaagggtgtaaatatttataattttttatacctgttgtgagacccgaggggcggcggcgcggttttttatggtgacacaaatgtatattttgctaacagcaattccaggctcagtattgtgaccgcggagccacaggggaccccacgcacattccgttgccttacccgatggcttgtgacgcggagagaaccgattaaaaccgtttgagaaactcctcccttgtctagccctgtgttcgctgtggacgctgtagaggcaggttgg

SEQ ID NO: 375 - DNA, 307 bp, Homo sapiens
cctactcttctccgtccattgtactatctgcccgtggtggggatggcagtaggatcatatttgatgacttccgagaagcatattattggctccgtcataatactccagaggatgcgaaggtcatgtcctggtgggattatggctatcagattacagctatggcaaaccgaacaattttagtggacaataacacatggaataatacccatatttctcgagtagggcaggcaatggcgtccacagaggaaaaagcctatgagatcatgagggagctcgatgtcagctatgtgctggtcatttttggagg

SEQ ID NO: 376 - DNA, 650 bp, Homo sapiens
  misc_feature 7, 10, 13: n = A,T,C or G
ccattgnctnctnacgtgatgtcatcatctgccaggtcatcttggcaaaagtcggagcatttctcagtcactgcaaagtagcccttctcgttggagcaccggaagagacgtgtgtgtttcatgtactcggcatcgtcatcatagggcttctgtgccccaatgcccacccagaagaagttctcaggctcctcaccttcgttgataacctgcttgctgtaggaggtgtcaaacatggtgttcaggatgtcttctgccaacttggcttcgtcagggtctgatgcccggcccacccaggcatacacgatgccctggttgtcctcactctcaaagggaaccttgaggatgaagcagaactcggagttgaggaggctggagtcggtgttgatctggatgcaccgggtgcagagggcgctgccgttggtgcggatctggtagaggctgggctgttgggcgccctggaccgccttcctcttgccccggtggatgatgaacttcctcttgaaatgggacaggaacttggggttctcctgctgctgcgtcatgcgtaccacctccagcttcccagggaagaggctctcgaacttcttttgcaggctgaaggtgaaggtgacccacccatattgggaggctttcacggccctgccagaagt

SEQ ID NO: 377 - DNA, 306 bp, Homo sapiens
  misc_feature 38: n = A,T,C or G
tctagatgcatgctcgagcggccgccagtgtgatgganatctgcagaattcgcccttcgagcggccgcccgggcaggttcgggtgctgccttcacctgccaggcccttccccgctagcttggggcgagcagagctgcgtccagtggaactaaagccgttccaggattatcaaaaactgagcagcaaccttgggggacctggatcatcacggactcccccaactggaaggtccttctctggcctcaattcccgtctcaaggccacgccttccacctacagtggagtcttccgcacccagcgcgtcga

SEQ ID NO: 378 - DNA, 199 bp, Homo sapiens
  misc_feature 6: n = A,T,C or G
ccacangtggcacttgggtgtggctcctctgttatttgtcctcatgtgagaaagcagatcatctccaaatcttgccatttgtatacttttggtggagacttggatgtcatatcttctttgttttgggttttcttccctagcttattttgtggcttttaaagaagtggattgtattgtgagatcctgtgattcctggtgg

SEQ ID NO: 379 - DNA, 216 bp, Homo sapiens
  misc_feature 9: n = A,T,C or G
ccagggcangtcatcaagaggggcattgtcttgcatgcggcctgccgtgtccaccagcaccacgtcaaagccttggttacgtgcaaaagcaatggcttccatggcaatgccagcagcatccttgccatagcccttttcaaacaactgcaccatggtgcggccaccatgcttctctggagggtgtagggcactcaaacgccgggtgtgtgtacgcag

SEQ ID NO: 380 - DNA, 555 bp, Homo sapiens
ccatgggccttcctttccactaaaaggaattccgaacagcaaaaagaaggtcttgagatagtgaaaatggtgatgatatctttagaaggtgaagatgggttggatgaaatttattcattcagtgagagtctgagaaaactgtgcgtcttcaagaaaattgagaggcattccattcactggccctgccgactgaccattggctccaatttgtctataaggattgcagcctataaatcgattctacaggagagagttaaaaagacttggacagttgtggatgcaaaaaccctaaaaaaagaagatatacaaaaagaaacagtttattgcttaaatgatgatgatgaaactgaagttttaaaagaggatattattcaagggttccgctatggaagtgatatagttcctttctctaaagtggatgaggaacaaatgaaatataaatcggaggggaagtgcttctctgttttgggattttgtaaatcttctcagggtcagagaagattcttcatgggaaatcaagttctaaaggctttgccccaagagatgatgaggcag

SEQ ID NO: 381 - DNA, 406 bp, Homo sapiens
ctgcaccaggtgggcctctaggtcccattaagcccattggtccagggccaagtccaactccttttccatcatactgagcagcaaagttcccaccgagaccaggggggccaggaggaccaggtggaccaggagggcctgtgggaccatcttcaccatctctgcctggggggcctggtggacccctttctccacgtggtcctctatctccggctgggccctttcttacagtttcctcttgtaaagattggcatgttgctaggcataaggttactgcaagcagcaacaaagtccgcgtatccacaaagctgagcatgtctagcacttagacatgcagactccttgtgtcgcagagcccctgggtcaccggcggaggtatcacctggcgggcgcgggcatgcagtcgtgg

SEQ ID NO: 382 - DNA, 528 bp, Homo sapiens
  misc_feature 18, 20: n = A,T,C or G
ctgagcagtttgtgggtntntcttcccgcaagtttcaggaagtattcacaaaagaaaaatacattttttcccccaggggtggggcaaggacagtggagagagtgctaggaaatgagtcccctgggaaaggggaccgggccgtgatgttaaatatctccggctcccaagtgactggatttgcctaggaccttcagaccaacagacttcagaccctcagacctgccccggggccaggtggagaaagtgagggccgtacaaggaagtgaaattctgagttgttggggctaagcctgaccccctctccatgctccccgccccaacccactctggcctcagtagatttttttttcagttgtggttgttgcccaggctggagtgcagtagcgccatcttggctcactgcacctccaccttccgggctcaagcgattctccagcctcagcctcctgagtagctaggactgcaggtgctccaccacgcccggctaatttttgtatttttagtagagatggggtttccccatgttgg

SEQ ID NO: 383 - DNA, 335 bp, Homo sapiens
  misc_feature 5, 321: n = A,T,C or G
ccatnttgagtctactcctgcgtcttgtgccctagcaccccgagaaccgtcagtttgagccagatggaagctgagctgaacacattacgatggatgatggaaacataagactatcaagaaatccaagtggtaatgggcgaagtttattcagcatccggcaatggacttatcgtagttggggaaacgggtgttccgaataatatcctggaagttatcaggacacctattttaaatataggcctgaattttgtaaagtaatatttaaggtggtccgtgataattaaataaaatgcttaattcatgtggcgaaaaaaaaaaaanaaaaaaaaaaaaaa

SEQ ID NO: 384 - DNA, 333 bp, Homo sapiens
agtccaatacggctattggggttgtagcagctttcagaggaaattagtggtctgggcttgcctccagctccccaggggcagccccagtagctacactgtccagacagcacaagaccaggctggtgtcacgtccatccgagcgctgcctcagggatcgataaagtttcactgcagaaagtctccactgcggtatgctgacatctgccctgaaccttcaccctacagcattacaggctttaatcagattctgctggaaagacacaggctgatccacgtgacctcttctgccttcactgggctggggtgatccttggtgcctttgtttccacaagg

SEQ ID NO: 385 - DNA, 343 bp, Homo sapiens
ctgtgacacctcaggttgaaagggtcttcctccttgaacacccaccgaggggcctggagcaacagccagccgatatggacttctagctgcaccgggtcactgagggtggagaggtttgtctggcacctgtactctccactgtcgtcgactgtggcagcgtcaatgaagtagctcgaggcctggcttgagatgaggctctcattgtgaaaccactgtgtggaattgtcctcaggggagtaggctccctggcacttcagagtcacactgtccttctcgagcaccctgtaccattgaggctccaggaacaccacagcctttgggagatcttcagtccgcatgccaa

SEQ ID NO: 386 - DNA, 244 bp, Homo sapiens
tattctttgattcttggcaaataggtgagagaactaatagcaaccaggcaactgaggacgaagtcaaaaagtcggtaacagaagaatggaatcagccaacccacttgataagaaattgctccataaaccagcattgaactgattataaacataagaacagagacggcaaaaagaacacaggcattatcagccattctctcagacgaatagtaattaccgatgacttcatactgaatgttgacag

SEQ ID NO: 387 - DNA, 504 bp, Homo sapiens
atctggagtccagcctcagggatgcgctactttccattctctgcattgaacattcgttctgtcagcatccgctccagcttcactgcatcagcggcaaacttgcggatcccgtcagagagcttctccacagccatctggtcctcgttgtgcaaccaacggaaagacttctcatccaggtggattttttccaggtcactggcttgggccgccttggctgagagcacaggcaccagcttggcgttgtcctgcagcagctctcccaggagcttgggtgggatggtgaggaagtcacagccggccagtgctttgatctcgcccgtgttgcggaaggaggcgcccatgacaatggttttgtagctaaacttcttgtagtagttgtagattttagtgacactctttaccccagggtcttccaggggctcataggatttcttgtcggtgtttgccacatgccaatcaaggatgcgcccaacaaatggggagatgagggtcacacccgcctcg

SEQ ID NO: 388 - DNA, 450 bp, Homo sapiens
  misc_feature 14, 199, 210, 218, 231, 267, 271, 290, 330, 342, 383, 390,395, 399, 405, 414: n = A,T,C or G
gccaaagtgctgcntgaattccactcccttggttttcgcctgcccagcgttgctgtttgcgtggagggtggggggagctcagtggcagggaatcagcggtccgtggggtcgtggggacgggaacatgtgcccgaccgctccatcccctcctcctccttaggatgcataacctaccttgtctttttttttttaaattttntttccaggtanagtagctntttgtacataaanaatacttgaaaaattaattgtatgatgtatgaaaanacanagtctcctagttttgtatnttgttgtatgactgccatgagttccaccaaaaagccactntattttggtctntgtgacattttaaatgcgtgacaaaagtgagcaaataaagngaggaanaaatntatntatganataatatanattgtattgaaatctaaaaaaaaaaaaaaaaaaaaa

SEQ ID NO: 389 - DNA, 297 bp, Homo sapiens
cctgcacttgaacatggctttggttttaagcaacttctctaccctgaccctcctcctgggacagcgtttcgggaggtttcttggcctcactgagagggatgtggagctgctgtaccccgtcaaggagaaggtattctacagcctgatgagggagagcggctacatgcacatccagtgcaccaagcctgacaccgtaggctctgctctgaatgactctcctgtgggtctggctgcctatattctagagaagttttccacctggaccaatacggaattccgatacctggaggatggagg

SEQ ID NO: 390 - DNA, 223 bp, Homo sapiens
ctgggctggagagttggtgctggcaaaacagtccttcccctggggccggttcttacccaggtccagagaaaccaacgcgggatgtcagacttcaccaaaaggactttctggttgcccctggctggcttcctggaggcgttcgcctctagtttctcagggatggagcgagagcccagccagagaacagtaagaggagctgctctcctatctgcactcacccagg

SEQ ID NO: 391 - DNA, 365 bp, Homo sapiens
ctgaggaagaaatgaaaaaagaccctgtccctcatggcccgcccactggcctcctgtgaactctgtcctgttgccaaccccagatgaagtcagccaaaaagtgctttccacatcctctctctggggctgcccagcctgaccgtaggggatccactggcagagccaaggtggatgctggtgcctgaagctggaagccagcaggacatgagacccctcctgtagcaggaagtggttctagaactcccagcagaacagaacggaaaaggagctgattggggatagaatgagttctgctaaacagccagatgctctgagagaggtgacactggactgtctcggaggtgtgtgcagatggctacaggtgg

SEQ ID NO: 392 - DNA, 302 bp, Homo sapiens
  misc_feature 28: n = A,T,C or G
ccaagagctacaatgagcagcgcatcangacagaacgtgcaggtttttgagttccagttgactgcagaggacatgaaagccatagatggcctagacagaaatctccactattttaacagtgatagttttgctagccaccctaattatccatattcagatgaatattaacatggagagctttgcctgatgtctaccagaagccctgtgtgtggatggtgacgcagaggacgtctctatgccggtgactggacatatcacctctacttaaatccgtcctgtttagcgacttcagtcaactacag

SEQ ID NO: 393 - DNA, 213 bp, Homo sapiens
  misc_feature 13, 19: n = A,T,C or G
ccaataatcaagnacaaanactggatttgaggatggatcagttctgaaacagtttctttctgaaacagagaaaatgtcccctgaagacagagcaaaatgctttggaaagaatgaggccatacaggcagcccatgatgccgtggcacaggaaggccaatgtcgggtagatgacaaggtgaatttccattttattctgtttaacaacgtggatgg

SEQ ID NO: 394 - DNA, 334 bp, Homo sapiens
cctacccataatccagagaggcttgcccagaggaggactacgtgggggacgtgccaccagaaccctacttgggggcgggatgtcactccgaggtcaaaacctgctccgaggtggacgagccgtagctccccgaatgggcttaagaagaggtggtgttcgaggtcgtggaggtcctgggagagggggcctagggcgtggagctatgggtcgtggcggaatcggtggtagaggtcggggtatgataggtcggggaagagggggctttggaggccgaggccgaggccgtggacgagggagaggtgcccttgctcgccctgtattgaccaaggagcag

SEQ ID NO: 395 - DNA, 174 bp, Homo sapiens
ccagatgaggaaaaaaattaggaaggagatgaagttttccaaatttcatggtatatgctgcacttccccaaccttcactctccatgtagcctactgggtctactattccacaaagtggctcaacctccaaatgacctctggtttacccctattaaaatcccaaaggactttcag

SEQ ID NO: 396 - DNA, 140 bp, Homo sapiens
  misc_feature 20: n = A,T,C or G
ctgcaaagccttgtgtaacnttctccagcatttggacccagtacgtgaaagcccacaacacgttcattgtctttagtattacagattatttttgcataacatttgttgttatctcttgacggaatcgtccattccaatgg

SEQ ID NO: 397 - DNA, 318 bp, Homo sapiens
cctcgcctggagggcccccgggcagcacagggaggacgagcttgtccagcagagggtctggcagagggtcccgcagaggtttgggcagggggtctgacatccctggctcctgctctggctctggctgccgggatttgcacaggcccaggtgcatacagatgccgtttgagtcagtctggttctggaagtagtcgatgaccagggggaagtagtcgtcaagcacttggttgcactggggcatgagcagcttcaaggggaggacgttgcactcctgctccaggaacttcctcatcgtgtcctggaaaatggcctccttgg

SEQ ID NO: 398 - DNA, 517 bp, Homo sapiens
  misc_feature 5: n = A,T,C or G
ccttncttcgccatccattcatcgaccctctccagcacttgctgcaggcttggctgaccatccaccatggcttgaataatcccggtgagctctgtacagaatggggtaagctgtggatggactacaggctggacatacatgtgaaaggtagactcaatctccatggtccggccatttagctttaggatggggaactcgatgatttcctgaggatgaatctgtggcttgtcgcacgtggcctcaaagtccagcactaaaaagtagtgatacctctggagagggaaggacaccattgccgccatggatgcgccaaagccgtgggccgccagctttctggtggatatggagcagaactccggaacaccacagggagaaaataagtgggagcccagcacttttcttgctcttgaaagtaaatacgaagaaaatcgagctgctccagtctgtaaaggtgctagcattgaacatccagaagcatctaaaactctccttacttcgaagatgccaagaccggcag

SEQ ID NO: 399 - DNA, 329 bp, Homo sapiens
ccaacctcaggcaacgggtggagcagtttgccagggccttccccatgcctggttttgatgagcattgaaggcacctgggaaatgaggcccacagactcaaagttactctccttccccctacctgggccagtgaaatagaaagcctttctattttttggtgcgggagggaagacctctcacttagggcaagagccaggtatagtctcccttcccagaatttgtaactgagaagatcttttctttttccttttttcggtaacaagacttagaaggagggcccaggcactttctgtttgaacccctgtcatgatcacagtgtcagagacgcg

SEQ ID NO: 400 - DNA, 451 bp, Homo sapiens
ctggcttcactgctcaggtgattatcctgaaccatccaggccaaataagcgccggctatgcccctgtattggattgccacacggctcacattgcatgcaagtttgctgagctgaaggaaaagattgatcgccgttctggtaaaaagctggaagatggccctaaattcttgaagtctggtgatgctgccattgttgatatggttcctggcaagcccatgtgtgttgagagcttctcagactatccacctttgggtcgctttgctgttcgtgatatgagacagacagttgcggtgggtgtcatcaaagcagtggacaagaagctgctggagctggcaaggtcaccaagtctgcccagaaagctcagaagctaaatgaatattatccctaatacctgccaccccactcttaatcagtggtggaagaacggctcagaactgtttgtttcaattgg

SEQ ID NO: 401 - DNA, 180 bp, Homo sapiens
ccaggaagcaggccaggggattggcagcactgcccagcaccacagccaggtggtaggccagacgcccgtagggtaagcaggaaaagctctgcacggcaggcagcacgccattggtcagcgcgttggtggcggccaacaggcccagcaggcaggcactgcgggctgatagaagctgatagg

SEQ ID NO: 402 - DNA, 385 bp, Homo sapiens
ccaggccacctgtgcggggctcctcgatgtggaaggttcgggtgaggagattgtagaaggagccgtagcacacggccaccacagtgcacgtgaggcagatcacgttgtagggcatgctgaagtccggtgtcggcaggttcaccagcagcggctccgtgtagagccgcacaaagtagttagagccatcagagactgggaacaggctgttgaagaggggactctcttcccagtccactggcttggctgctaccatgctgggcacaagggcgctgaggacagatgggctgacatagaagccatggttaggatctggcgtgtactcggtccacttcagcagcgcccgctcaaactggatggaaaccttggtgactgagttggccggcag

SEQ ID NO: 403 - DNA, 440 bp, Homo sapiens
  misc_feature 13: n = A,T,C or G
ctgtttaaccagnaacccggggggtcaccccccacagaatgtacatgaaacactagaggactgcatgtttttccctgagagaagcgtaagacaaacagaagtcaaaaagtagtcactgggagcgccatccttctaagcaaatcctccctttcccttttggaggatttgcccgaactacgtagccagtcagcacttagaccacctgcctcctcccccccctataaacccaccactcccctcctcctttcccaaaccacttggggtgtcctaagccctcactgccccaagcccaaaatatcagctaagatccttgtcagtatttccacagtcatacctaatgaattgggaagtggggcccctaaaaaccaattcacatctatgcacttgtttccactggatttggcagacaggcttttttagttaccgtaaccagatcttaa

SEQ ID NO: 404 - DNA, 239 bp, Homo sapiens
cctacgaaaaactcccggccggtgaagagaacgtcagtgccatccagcgtcgcgttctcgtctcctatttccacaattcggagccccaggtcttgcagggctttgcggactccatcgacctctggcctacgagcggggctccagggccgcgtgattagggccgtgtccccttggatcacggccgtgtcgccaagcagcggtcccagcggcaatgactcctcaggtggcagttctagcag

SEQ ID NO: 405 - DNA, 261 bp, Homo sapiens
ctggagaggcagcccttcaccggatgcccagctccgtgcccctgcgggccccagcacagtttaccttctccccccacggcggtcccatctactctgtgagctgttcccccttccacaggaatctcttcctgagcgctgggactgacgggcatgtccacctgtactccatgctgcaggcccctcccttgacttcgctgcagctctccctcaagtatctgtttgctgtgcgctggtccccagtgcggcccttggtttttgcag

SEQ ID NO: 406 - DNA, 641 bp, Homo sapiens
  misc_feature 13: n = A,T,C or G
ctgctcccgggcntggtggcagcaagtagacatcgggcctgtgcagggccacccccttgggccgggagatggtctgcttcagtggcgagggcaggtctgtgtgggtcacggtgcacgtgaacctctccccggaattccagtcatcctcgcagatgctggcctcacccacggcgctgaaagtggcattggggtggctctcggagatgttggtgtgggttttcacagcttcgccattctggcgggtccaggagatggtcacgctgtcataggtggtcaggtctgtgaccaggcaggtcaacttggtggacttggtgaggaagatgctggcaaaggatggggggatggcgaagacccggatggctgtgtcttgatcggggacacacatggaggacgcattctgctggaaggtcaggcccctgtgatccacgcggcaggtgaacatgctctggctgagccagtcgctctctttgatggtcagtgtgctggtcaccttgtaggtcgtgggcccagactctttggcctcagcctgcacctggtccgtggtgacgccagaccccacctgcttcccctcgcgcagccaggacacctgaatctgccggggactgaaacccgtggcctggcagatgagcttggacttgcgg

SEQ ID NO: 407 - DNA, 173 bp, Homo sapiens
ccaggtactggcacaatcatgtctggatgggggtggtggtgtcctgtaggcagagaaacaggaaattgtcgtagtcagtatcgagcagcgtggcctcgttcgccaccgtatagttgatcttgaacttctttggattctcagtcttctctccaaggaccttcttctcaacacag

SEQ ID NO: 408 - DNA, 165 bp, Homo sapiens
ccactgtctgcagccatggcagaaagtgctcaaagtccagcaccttcacattcatctcatcactcttggggttccccaggaccttgagcacctcggcgttggtagggttctggcccagggccctcatcacatccccacactggctgtacaggatcttgccatcac

SEQ ID NO: 409 - DNA, 329 bp, Homo sapiens
ctgtagcttctgtgggacttccactgctcaggcgtcaggctcagatagctgctggccgcgtacttgttgttgctttgtttggagggtgtggtggtctccactcccgccttgacggggctgctatctgccttccaggccactgtcacggctcccgggtagaagtcacctatgagacacaccagtgtggccttgttggcttgaagctcctcagaggagggcgggaacagagtgaccgagggggcagccttgggctgaccaaggacggtcagcttggtccctccgccaaataccgccggataagcaccactgttgtctgctgattgacagaa

SEQ ID NO: 410 - DNA, 235 bp, Homo sapiens
  misc_feature 8: n = A,T,C or G
ccatcagngagaaaggtgtttgtcagttgtttcacaaaccagattgaggaggacaaactgctctgccaatttctggatttctttattttcagcaaacactttctttaaagcttgactgtgtgggcactcatccaagtgatgaataatcatcaagggtttgttgcttgtcttggatttatatagagctttttcatatgtctgagtccagatgagttggtcaccccaacctctggag

SEQ ID NO: 411 - DNA, 294 bp, Homo sapiens
aattaagggaagatgaagatgataaaacagttttggatcttgctgtggttttgtttgaaacagcaacgcttcggtcagggtatcttttaccagacactaaagcatatggagatagaatagaaagaatgcttcgcctcagtttgaacattgaccctgatgcaaaggtggaagaagagcctgaagaagaacctgaagagacagcagaagacacaacagaagacacagagcaagacgaagatgaagaaatggatgtgggaacagatgaagaagaagaaacagcaaaggaatctacag

SEQ ID NO: 412 - DNA, 433 bp, Homo sapiens
  misc_feature 135, 138, 153, 162, 187, 206, 208, 212, 214, 219, 224, 237,254, 271, 295, 303, 330, 336, 348, 358, 364, 367, 375, 394,433: n = A,T,C or G
cctgagaagccagaggcaggtggagagggggtggaaagtgagcagcgggctgggctggagccgcacacgctctcctcccatgttaaatagcacctttagaaaaattcacaagtccccatccacaaaaaaaaaaanaanaaaaatttcagggantaaaaatanactttgaacaaaaaggaacatttgntggcctgggggggcatctnantttntntagcnccagngattccctccccnccccacccatcacatanatgtaacacctttggtntaaaatggggagccgtttccaccntgcccccntccccgcccccaggcagttgccccggngacacntcaagacaggancgaggtagtntttcancancacagttncacaaggaacagaacagtntctcccgcccagccctgcggcacaagggattgacacgcn

SEQ ID NO: 413 - DNA, 494 bp, Homo sapiens
  misc_feature 17: n = A,T,C or G
ccttatttctcttgtcncttcgtacagggaggaatttgaagtagatagaaaccgacctggattactccggtctgaactcagatcacgtaggactttaatcgttgaacaaacgaacctttaatagcggctgcaccatcgggatgtcctgatccaacatcgaggtcgtaaaccctattgttgatatggactctagaataggattgcgctgttatccctagggtaacttgttccgttggtcaagttattggatcaattgagtatagtagttcgctttgactggtgaagtcttagcatgtactgctcggaggttgggttctgctccgaggtcgccccaaccgaaatttttaatgcaggtttggtagtttaggacctgtgggtttgttaggtactgtttgcattaataaattaaagctccatagggtcttctcgtcttgctgtgttatgcccgcctcttcacgggcaggtcaatttcactggttaaaagtaagagacag

SEQ ID NO: 414 - DNA, 294 bp, Homo sapiens
ctgggcggatagcaccgggcatattttggaatggatgaggtctggcaccctgagcagtccagcgaggacttggtcttagttgagcaatttggctaggaggatagtatgcagcacggttctgagtctgtgggatagctgccatgaagtaacctgaaggaggtgctggctggtaggggttgattacagggttgggaacagctcgtacacctgccattctctgcatatactggttagtgaggtgagcctggcgctcttctttgcgctgagctaaagctacatacaatggccttgtgg

SEQ ID NO: 415 - DNA, 421 bp, Homo sapiens
ccttgcccctgccctcccacgaatggttaatatatatgtagatatatattttagcagtgacattcccagagagccccagagctctcaagctcctttctgtcagggtggggggttcagcctgtcctgtcacctctgaggtgcctgctggcatcctctcccccatgcttactaatacattcccttccccatagccatcaaaactggaccaactggcctcttcctttcccctgggaccaaaatttaggggcctcagtccctcaccgccatgccctggcctattctgtctctccttcttccccctggcctgttctgtctctgagctctgtgtcctccgttcattccatggctgggagtcactgatgctgcctctgccttctgatgctggactggccttgcttctacaagtatgcttctcccacag

SEQ ID NO: 416 - DNA, 342 bp, Homo sapiens
  misc_feature 17: n = A,T,C or G
ccactttctttcccacnctggaaggcggcatctatgacttcattggggagttcatgaaggccagcgtggatgtggcagacctgataggtctaaaccttgtcatgtcccggaatgccggcaagggagagtacaagatcatggttgctgccctgggctgggccactgctgagcttattatgtcccgctgcactcccctatgggtcggagcccggggcattgagtttgactggaagtacatccagatgagcatagactccaacatcagtctggtccattacatcgtcgcgtctgctcaggtctggatgataacacgctatgatctgtaccacaccttccggccgg

SEQ ID NO: 417 - DNA, 389 bp, Homo sapiens
tattaattaggttcttaagacatttagaacaccaatttgtgaggataaattccattcgtcagagcaaacacagatcgcaggtagccctggagctgaggaatagctttgatttttggtaaaatttgtgagtccacagctttctgatcaatcttgcgctgctccgtaatctcatatttctctttttctgtgtcgaagatctcaccttcctggtgtctgggcttccgcagcttcttcttcttgaagtaagcatcagtaagatgttttgggatttttacattgctgatatcgattttggttgaagtggcaatgacaaatttctggtgtgttcttcgtagaggaactcgattgaggaccagaggtccagtcacaagtaataagccactagccag

SEQ ID NO: 418 - DNA, 343 bp, Homo sapiens
gtgggagggagccaggttgggatggagggagtttacaggaagcagacagggccaacgtcgaagccgaattcctggtctggggcaccaacgtccaagggggccacatcgatgatgggcaggcgggaggtcttggtggttttgtattcaatcactgtcttgccccaggctccggtgtgactcgtgcagccatcgacagtgacgctgtaggtgaagcggctgttgccctcggcgcggatctcgatctcgttggagccctggaggagcagggccttcttgaggttgccagtctgctggtccatgtaggccacgctgtttttgcagtggtaggtgatgttctgggagg

SEQ ID NO: 419 - DNA, 255 bp, Homo sapiens
cctagcaagagaatcaccaaatttatggagagttaacaggggtttaacaggaaggaagtgcctttagtaagttctcaagccagaggctggaggcagcagctaaatcagaggacagcatcctcagtgaaagtgagccattcggggtggcatgtcactccaggaataaacacaacttagaaacaaatgatttcgtaggatagcacagtgacatggtgcactgtgaacctgaggccactgtgtcaaactgtgcactgg

SEQ ID NO: 420 - DNA, 261 bp, Homo sapiens
cttctgatgataaccaacccctagctaccactctgtattcatcaggggaggggtataaaccccacatgcaagaagaacccttgcccccagtgtcaaatgggatggggatgctagagttatagtaaaggggaaaccctatgtaagctgttaacagagttcacaggggtagggataacccctgttctccagctcccaaatgtgctcactttcccagcttcttcatccgttcatcaatgctggcaaagttcccctcaactgtgg

SEQ ID NO: 421 - DNA, 179 bp, Homo sapiens
ccttcctgttgttgtttcaaatgctgcttgatttctcgtaacagatctgcatctatgtaatacctttcttcagatctgactgctccaaaatgattctgcatcctgatttgagacatcaattcatttagtcggcccttgaactgagtaggtgcatttagttcaccctgaatcgtatccag

SEQ ID NO: 422 - DNA, 424 bp, Homo sapiens
cgaggtccaaatctgatctgcagatgcagaagattcgacagaagctgcagactaaacaggctgccatggagaggtctggaaaagctaagcaactgcgagcacttaggaaatacgggaagaaggtgcaaacggaggttcttcagaagaggcagcaggagaaagcccatatgatgaatgctattaagaaatatcagaaaggcttctctgataaactggatttccttgagggagatcagaaacctctggcacagcacaagaaggcaggagccaaaggccagcagatgaggaaggggcccagtgctaaacgacggtataaaaaccagaagtttggttttggtggaaagaagaaaggctcaaagtggaacactcgggagagctatgatgatgtatctagcttccgggccaagacagctcatggcagagg

SEQ ID NO: 423 - DNA, 256 bp, Homo sapiens
ctgtggcctagggctacctcaagactcacctcatccttaccgcacatttaaggcgccattgcttttgggagactggaaaagggaaggtgactgaaggctgtcaggattcttcaaggagaatgaatactgggaatcaagacaagactataccttatccataggcgcaggtgcacagggggaggccataaagatcaaacatgcatggatgggtcctcacgcagacacacccacagaaggacactagcctgtgcacgcg

SEQ ID NO: 424 - DNA, 330 bp, Homo sapiens
ccagccgcatgggagtggaggcagtcatcgccttgctagaggccaccccggacaccccagcttgcgtcgtgtcactgaacgggaaccacgccgtgcgcctgccgctgatggagtgcgtgcagatgactcaggatgtgcagaaggcgatggacgagaggagatttcaagatgcggttcgactccgagggaggagctttgcgggcaacctgaacacctacaagcgacttgccatcaagctgccggatgatcagatcccaaagaccaattgcaacgtagctgtcatcaacgtgggggcacccgcggctgggatgaacgcggccgtacgctcag

SEQ ID NO: 425 - DNA, 333 bp, Homo sapiens
  misc_feature 12, 124, 133, 145, 152, 244, 249, 254, 263, 307: n = A,T,C or G
ctgctccatggnctcaaagtcagcaccacccacacccacaatgatcactgacatgggcaggttcgaggcacgcaccacagcctcacgtgtggcttccacatccgtcacagcaccatcagtcagnagaaacagnatgaagtattgngaggcantcccctgatgtgcagcctgggctgcaaacctggacctgcccgggcggccgctcgaaagggcgaattccagcacactggcggccgttactagnggatncaganctcggtacnaagcttggcagtaatcatggtcatagctgtttcctgtgagcggntgggatgaacgcggccgtacgctcat

SEQ ID NO: 426 - DNA, 411 bp, Homo sapiens
  misc_feature 346: n = A,T,C or G
gggtgttcatcatgaggattgcttctgccatggagctgatggacgtgggcaggttgctgagaaggtggggtggaagtgagtgccgggggtgggtgagtgccctggtcttgttcataggggagcctttccctagcagtggaacgctgtggtcattttctctagcatattcccttgggaagtctagatttgctattaatctggctgagaatctaagttctgtgccttagagacagtttgcactttcccatattgtgcctgggacagccatatgattttttttcccaccaaacaagtatgcaaacagaaaccagttcaaagggggatggtgtaaaagatgaggcagtanaaatgcctttgaatggttttctgtagctaattctctttaaattttgtcctgctttttttctttat

SEQ ID NO: 427 - DNA, 450 bp, Homo sapiens
  misc_feature 136: n = A,T,C or G
acgtgtacaagtttgaactggatacctctgaaagaaagattgaatttgactctgcctctggcacctacactctctacttaatcattggagatgccactttgaagaacccaatcctctggaatgtggctgatgtggncatcaagttccctgaggaagaagctccctcgactgtcttgtcccagaaccttttcactccaaaacaggaaattcagcacctgttccgcgagcctgagaagaggccccccaccgtggtgtccaatacattcactgccctgatcctctcgccgttgcttctgctcttcgctctgtggatccggattggtgccaatgtctccaacttcacttttgctcctagcacgattatatttcacctgggacatgctgctatgctgggactcatgtatgtctactggactcagctcaacatgttccagaccttgaagtacctgg

SEQ ID NO: 428 - DNA, 377 bp, Homo sapiens
  misc_feature 133, 181, 246, 264, 280, 290, 300, 325, 360, 362, 374: n = A,T,C or G
cagggctatagtgcgctatgttgatctggtgttcatgctaagttccgcatcaatatggtgacttcttgggagtgggggaccaccaggttgcctaaggaggggtgaacctgcctacgttggaaatagagctggncaaaactcctgtgctcatcagtagtagaattgcacctgtgaatagccnccgccctccagcatgggcaacataacaagaccctgcctcttaaagataaaaattggaaaacactngtaggaaaaaaagggtgnttggtctaaataaatntggattgggnataaatgacncaaaactatcatgaatttgaaagcntttctaatttcttgaaagtctgaaaaaagttaaancncaattttatctnaaa

SEQ ID NO: 429 - DNA, 206 bp, Homo sapiens
gttgctcctccaaagaaggttggcttcaaggccgtgtccagggacccacgagcagaggcactggggggcaagggatctccaagggggcaagggatccctaaagggggtagctcacaggtgagggggtttagggcccctctagggagcgcctgaggccatacattcaagagtgtccctggtgaggcccagggaagagccaggactgg

SEQ ID NO: 430 - DNA, 473 bp, Homo sapiens
  misc_feature 9, 329, 335, 363, 365, 448: n = A,T,C or G
ccttatttntcttgtcctttcgtacagggaggaatttgaagtagatagaaaccgacctggattactccggtctgaactcagatcacgtaggactttaatcgttgaacaaacgaacctttaatagcggctgcaccatcgggatgtcctgatccaacatcgaggtcgtaaaccctattgttgatatggactctagaataggattgcgctgttatccctagggtaacttgttccgttggtcaagttattggatcaattgagtatagtagttcgctttgactggtgaagtcttagcatgtactgctcggaggttgggttctgctccgaggtcnccccanccgaaatttttaatgcaggtttggtagntnaggacctgtgggtttgttaggtactgggtgcattaataaattaaagctccatagggtcttctcgtcttgctgtgttatgcccncctcttcacgggcaggtcaatttca

SEQ ID NO: 431 - DNA, 215 bp, Homo sapiens
  misc_feature 8, 15: n = A,T,C or G
cctgtatnaagctanaaaaagactaccagcccgggatcaccttcatcgtggtgcagaagaggcaccacacccggctcttctgcactgacaagaacgagcgggttgggaaaagtggaaacattccagcaggcacgactgtggacacgaaaatcacccaccccaccgagttcgacttctacctgtgtagtcacgctggcatccaggggacaagcagg

SEQ ID NO: 432 - DNA, 391 bp, Homo sapiens
  misc_feature 377: n = A,T,C or G
ccagcactgccacaaactttttcagggccaccaggcgctgcccttccaggaccgggaacctgcccacttctatccgcaggatgtagtgcagtgcagattccaggtcagccatgtagatcctggagcgatctgccaatttccaaacagtgggagctatcttgttagcagtggttggtgcaactgtggtctgggcagcctccctggtgagcccagagagtctctgcaggtaagcggtatagaaggacctggattccatgagcacggggactcgggagacggagccattccggaacagcaggtagcaagaggggaagtcggtgacaccaaactttctcaccacattggcctctgtgttcagcaccctgcgcaccgccacncctttgtgctggga

SEQ ID NO: 433 - DNA, 420 bp, Homo sapiens
  misc_feature 275, 295, 328, 374, 399, 413, 420: n = A,T,C or G
ctgtagcttctgtgggacttccactgctcaggcgtcaggctcagatagctgctggctgcgtacttgttgttgctttgtttggagggtgtggtggtctccactcccgccttgacggggctgctatctgccttccaggccactgtcacggctcccgggtagaagtcacttatgagacacaccagtgtggccttgttggcttgaagctcctcagaggagggcgggaacagagtgaccgagggggcagccttgggctgacgtaggacggttagtttggnccctccgccgaatgccgcanttctactgtcccacacctgacagtaatagtcancctcatcttcggcttgggctctgctgatggtcagggtggcccgtgntccccgagttggagccagggaatcnctcagggatcccanagggccn

SEQ ID NO: 434 - DNA, 239 bp, Homo sapiens
  misc_feature 8, 199, 236: n = A,T,C or G
ccaaccangagagaagggatcgcctggtgcccagggcccaccaggagctccaggcccacttgggattgctgggatcactggagcacggggtcttgcaggaccaccaggcatgccaggtcctaggggaagccctggccctcagggtgtcaagggtgaaagtgggaaaccaggagctaacggtctcagtggagaacgtggnccccctggaccccagggtcttcctggtctggctggtncag

SEQ ID NO: 435 - DNA, 415 bp, Homo sapiens
  misc_feature 78, 225, 228, 276, 328, 330, 339, 352, 378, 387, 405, 415: n = A,T,C or G
ctgtccaatggcaacaggaccctcactctattcaatgtcacaagaaatgacgcaagagcctatgtatgtggaatccanaactcagtgagtgcaaaccgcagtgacccagtcaccctggatgtcctctatgggccggacacccccatcatttcccccccagactcgtcttacctttcgggagcaaacctcaacctctcctgccactcggcctctaacccatccccncantattcttggcgtatcaatgggataccgcagcaacacacacaagttctntttatcgccaaaatcacgccaaataataacgggacctatgcctgtttagggntntaacttggntactggccgcaanaattccatagtcaagagcatcacagnctctgcatntggaacttctcctggctntcagacctgn

SEQ ID NO: 436 - DNA, 152 bp, Homo sapiens
ccaggattgacaggccatccattcacagccaggagatgctgggccagtccctccaagaggtctccgtcatggcagtgatgaaaacctaacagggtggccccctgtgccagctcaggtgactggagcccgagggcctgacaggttcccagcag

SEQ ID NO: 437 - DNA, 174 bp, Homo sapiens
ccaggtactggcacatcatgctctggatgggggtggtggtgtcctgtaagcagagaaacaggaaattgtcgtagtcagtatcgagcagctgtggcctcgttcgccaccgtatagttgatcttgaacttctttggattctcagtcttctctccaaggaccttcttctcaacacag

SEQ ID NO: 438 - DNA, 485 bp, Homo sapiens
  misc_feature 324, 371, 393, 412, 419: n = A,T,C or G
ccacggccctctcggccctctcgctgggagcggagcagcgaacagaatccatcattcaccgggctctctactatgacttgatcagcagcccagacatccatggtacctataaggagctccttgacacggtcaccgccccccagaagaacctcaagagtgcctcccggatcgtctttgagaagaagctgcgcataaaatccagctttgtggcacctctggaaaagtcatatgggaccaggcccagagtcctgacgggcaaccctcgcttggacctgcaagagatcaacaactgggtgcaggcgcagatgaaagggaagctcgccnggtccacaaaggaaattcccgatgagatcagcattctccttctcggngtggcgcacttcaaggggcagngggtaacaaagtttgactncagaaangacttccctcgaggatttctacttggatgaagagaggaccgtgagggtccccatgatgtcggaccc

SEQ ID NO: 439 - DNA, 317 bp, Homo sapiens
  misc_feature 146, 268: n = A,T,C or G
gggccgtcttcccctccatcgtggggcgccccaggcaccagggcagtgatggtgggcatgggtcagaaggattcctatgtgggcgacgaggcccagagcaagagaggcatcctcaccctgaagtaccccatcgagcacggcatcgncaccaactgggacgacatggagaaaatctggcaccacaccttctacaatgagctgcgtgtggctcccgaggagcaccccgtgctgctgaccgaggcccccctgaaccccaaggccaaccgcnagaagatgacccagatcatgtttgagaccttcagcaccccagccatgta

SEQ ID NO: 440 - DNA, 338 bp, Homo sapiens
  misc_feature 4: n = A,T,C or G
ccanaaagacttcccagggaagatgcttggctctctgctccaaggtgggccatggtatagggccctcgaagggcttgtggctggggtgatcccagggggcattgctcaaagtgcacaggaggtggcagcagggtcaggcgagttcctgttccagggacatcaggagggagggtagaagcctagggagtgtgcgaggctgctgggatgagggagctcaggggctaccagctaaccagcctcagctcaatggtttctccatccttgggtctgtagtcagcaataccttgcaacagtggggtgttggggtctcggagaagctgccagaactccctttctcc

SEQ ID NO: 441 - DNA, 505 bp, Homo sapiens
  misc_feature 10, 186, 246, 321, 330, 403, 404, 406, 416, 445, 459, 481,484: n = A,T,C or G
ccacacagantcaccaagccacagacttgtcttccacaagcacgttcttatcttagccacgaagtgaccaagccacacgtactaaaggttgaactcaaagatatgtacagggtattaaacaaataccaaggggaacagttaacttcaatacaaggtcgaaatcagcaacaagttctacaatccagngctgatatcagatacaagcttcaaggacaatttcttttcgaaggcttattccagtttcgngaggctagcatgaggtgtgtgcatttgccaggggcaaatttctattctcaattaacccatgcagcaaatgctacncatggtgcngagtccgtttagaagcatttgcggtggacgatggaggggcccgactcgtcttactcctgcttgctaatccacnngngctggaaggnggacagtgaggccacggatggagccaccnatccacaccgagtncttgcgctctgggggtgcgatnatnttgatcttcatggtgctgggc

SEQ ID NO: 442 - DNA, 386 bp, Homo sapiens
  misc_feature 331, 369: n = A,T,C or G
cgccaggtgatacctccgccggtgacccaggggctctgcgacacaaggagtctgcatgtctaagtgctagacatgctcagctttgtggatacgcggactttgttgctgcttgcagtaaccttatgcctagcaacatgccaatctttacaagaggaaaccgtaagaaagggcccagccggagatagaggaccacgtggagaaaggggtccaccaggccccccaggcagagatggtgaagatggtcccacaggccctcctggtccacctggtcctcctggcccccctggtctcgatgggaactttgctgctcagtatgatggaaaaggagggnggacttggccctggaccaatgggcttaatgggacctanaggcccacctggtgcag

SEQ ID NO: 443 - DNA, 404 bp, Homo sapiens
  misc_feature 241, 306, 311, 328, 339, 362, 372, 385: n = A,T,C or G
cctccctctcagagcttgccccagggactctctggccctcagggttcaatgtattctgaccaaggccaagctttcctggggctcagggaaaatcacactttgctacccgaagctgtatcccctcagatgccaggaaggccgtgatcatctgactccaccctcctgagacacattctctccctgactgtcctgttctaagtcagcggagcaccttaggatggaggggtggaggcgaggccangatgcagcctctgtgaacaggtgcctggaggctgggaaatgaccctgagagggcaggacacagcnaccgngggcttaaggtgagggnggagagcaagnttggcccactttacaattctagntcagagccancccctaacatggngggcatttattcatttcgg

SEQ ID NO: 444 - DNA, 318 bp, Homo sapiens
  misc_feature 58, 69, 87, 195, 250, 275, 286, 302, 305, 317: n = A,T,C or G
catgggctatagtgcgctatgttgatctggtgttcatgctaagttccgcatcaatatngcgacttcttnggagtgggggaccaccangttgcctaaggaggggtgaacctgcctacgttggaaatagagctggtcaaaactcctgtgctcatcagtagtagaattgcacctgtgaatagccaccgccctccagcntgggcaacatagcaagaccctgcctcttaagataaaaattggaaaacactggtangaaaaaaaggctgtttggtctaaanaagtctggatngggtataaatgacacnaanctatcatgactnt

SEQ ID NO: 445 - DNA, 418 bp, Homo sapiens
  misc_feature 288, 354, 375, 387, 389, 400: n = A,T,C or G
ccagtccaacctgctcctcattattgtataaatgagcagaatcaatatggcggaagccagcttcaattgccaatttggtggcctctaaagctttacttttaggaacctctgcaggcgcataggtgccaaatcccaggacaggcatgaagtgaccatcattcagcttcacacactgatatttcgaatccatttctgtcactagcctggctggcaaatgtttctttcttcctccctcacaggctataagagcaatgagctggcaacgcccctgagcacactgtctgctgnttaaccaatggcatgtgagaggagggacagaggcagtcttacacaagctgtgataaaaattgcatncagttcaaccagtttcttacnttattctaatgngnaggaagtgtgngaagagcacaaagtcaga

SEQ ID NO: 446 - DNA, 361 bp, Homo sapiens
  misc_feature 10, 78, 89, 148, 193, 201, 253, 259, 265, 288, 290, 292,298, 318, 342, 343, 346, 354: n = A,T,C or G
ctgtccaatnacaacaggaccctcactctactcagtgtcacaaggaatgatgtaggaccctatgagtgtggaatccanaacgaattaantgttgaccacagcgacccagtcatcctgaatgtcctctatggcccagacgaccccaccntttccccctcatacacctattaccgtccaggggtgaacctcagcntctcctgncatgcagcctctaacccacctgcacagtatccttggctgattgatgggaacntccagnaacacnacacaagagctctttatctccancntnactganaagaacagcgcgactctatnccttccagggggggggggtggggnntgnggaccttnccgggcc

SEQ ID NO: 447 - DNA, 321 bp, Homo sapiens
  misc_feature 7, 9, 105, 121, 192, 202, 213, 299, 301, 305: n = A,T,C or G
ccagganantggttccccaaaggggacctcacccgccccgagctctggagccgctgacgctcgcatccaggacatttgagatgggaatccaaataggctacttgnaaaagacgtgctgcangcagccctggagagactcatggagttcattgtacattactccatctaccgaggcagcgcatggcatgactnaacggcttgnaacaaacacanaaattaccaccacaaacattcaggaaccaaatataatctgctatggtcacaccacagacaatgcaggaagaggctttttattgctngngtgngttttcaaatcatgtt

SEQ ID NO: 448 - DNA, 325 bp, Homo sapiens
  misc_feature 107, 222, 251, 296, 301, 325: n = A,T,C or G
ccagcttcaactttttagtatagaagatacaggatcacaaaaaggagactacgctttgcaaacatagcatcaaaattcaacttttctctttgcagtttatccatggngtcagcataccttgcaagggaagctacttacatcaaataacttttctatatacatttcctcattgaccttttctcaaagaatatcttggttttgccgaacaaacataatataggngtctgccagatccattcctggtttctgtngtgaaggaaaagcagggggaacaaaataatatcagggtctcaatngtganattattatttaatcataccctgan

SEQ ID NO: 449 - DNA, 123 bp, Homo sapiens
  misc_feature 8, 69, 70: n = A,T,C or G
cattaatnttggaagcgatggtgtggattacatcagtgttagggcatggtgtggatattattacattannattggaagcgatggtgtggattacatcagtgatagggcacggtgtggatatta

SEQ ID NO: 450 - DNA, 328 bp, Homo sapiens
  misc_feature 241, 257, 323, 325, 328: n = A,T,C or G
ctggcaattttgagctgccggttatacaccaaaatgttctgttcagtacctagctctgctcttttatattgctttaaatttttaaagaaattatattgcatggatgtggttatttgtgcatattttttaacaatgcccaatctgtatgaataatgtaaacttcgatttttttttaaaaaaattagattttagctggagcttttgactaatgtaaagtaaatgccaaactaccgacttgatngggatgtttttgtaangttaattttctaagactttttcacatccaaagtgatgctttgctttgggttttaactgtttcaacntnggn

SEQ ID NO: 451 - DNA, 209 bp, Homo sapiens
ctgccttgtttcaacagacatgcaaagatcctaggagacagtccccatagaccttcagacattaaaaagggagccgtacagtttgtttgaagcacttcgtcttacccatttatgcaggggccccaggaaacttacacacagccagaatgaggttcccaaaggacttacattaattatggctcttgcttcctttcacaaatgagctgagg

SEQ ID NO: 452 - DNA, 457 bp, Homo sapiens
  misc_feature 8, 290, 392, 416: n = A,T,C or G
ctgtctantcccttcaagagctgtttatagaagcttgagaatggggtaaaaatttctgctagcaaaatcaagttctttttgaaattttatcagtaatccagaatttagtagtccatgccttctcactcagcatttagaaataaaaatgtggtttcttaaacgtatatcctttcatgtatatttccacatttttgtgcttggatataagatgtatttcttgtagtgaagttgttttgtaatctactttgtatacattctaattatattatttttctatgtattttaaatgnatatggctgtttaatctttgaagcattttgggcttaagattgccagcaccacacatcagatgcagtcattgttgctatcagtgtggaatctgatagagtctngactccggccacttggagttgtgnactccaaagctaaggacagtgatgaggaagatggcatgtgg

SEQ ID NO: 453 - DNA, 277 bp, Homo sapiens
ccaattgatttgatggtaagggagggatcgttgacctcgtctgttatgtaaaggatgcgtagggatgggagggcgatgaggactaggatgatggcgggcaggatagttcagacggtttctatttcctgagcgtctgagatgttagtattagttagttttgttgtgagtgttaggaaaagggcatacaggactaggaagcagataaggaaaatgactacgagggcgtgatcatgaaaggtgataagctcttctatgataggggaagtagcgtcttgta

SEQ ID NO: 454 - DNA, 198 bp, Homo sapiens
gttaaaagatagtagggggatgatgctaataatcaggctgtgggtggttgtgttgattcaaattatgtgttttttggagagtcatgtcagtggtagtaatataattgttgggacgattagttttagcattggagtaggtttaggttatgtacgtagtctaggccatatgtgttggagattgagactagtagggctagg

SEQ ID NO: 455 - DNA, 608 bp, Homo sapiens
  misc_feature 43, 225, 502, 508, 569: n = A,T,C or G
ctgagcaagctaaggaccaggggcaactagaccctaataatgngtacttttgaaaatgatacaaactaccttggttgtaagaagtgcaggttgaacactttaggagaacagtcttcaaactggcaattcaaaatttcccattatatgtgaataaaattggaaggatgttaaatgtccatggaaagttactcttgtaagttaggatgccttatactgaggctttanaatgaaagtacacttcacaaatggaatagtgaacataaattaccagaagtcaagataatagtcatactagtaaggtaagcaaggtaaattcccttatacacaaaaattattttgatgacctttttcaataatgaatctgaaatgaagtgttttaaaaagctccctaaacacaaaacgaacataaaactgcttaataactttagagctcatgtaatattcttgctgaaaacagttactgaaattaccagcgaaatgatggaatatctttaaagcaggncactcngtataatctggaataatttcatttgctaacttttaagaagtattctctggactataaatcntgggcaaatagacttccactttattattaccccaaatta

SEQ ID NO: 456 - DNA, 467 bp, Homo sapiens
  misc_feature 358: n = A,T,C or G
cctggacctgtgtaaaccttcaaacactcttttttacattaggtcgtgaagttaaattttttactgtttctgtgctacagactcttcaaagggaaatagttaagtcaatttcaaagaaaatgaccagcacatttttaaaacattagaaatgatttgactttgactatctactgccaaaaaaaggttaaggaatttgtaatgagaagctaaaaactttaaggaattttaaggaactcaaaacaaaaactcattaaatgtaattaaagtgaattctacaaataaagcctcttaatacatttctataatagtcacttaagacttaaattcaaacactagcaaaccacaaaatcagactgtntgactgacatccaaaagataaatataaatcaaaatccgaccccagcattagccaaggggtaggtgttcctcttgaggaaggcaggaattcctcttctgccacctgttgg

SEQ ID NO: 457 - DNA, 183 bp, Homo sapiens
  misc_feature 10: n = A,T,C or G
ccaaattttntactttaaacactgaaaacagaggaagttaataaaaattttaacctataaagtcccctggttgttagtcattaacagcagattgtcagataagactggtaaaatgatggctgctaagcatttgatgatccaggcgcaggatgatcaaactgcagcagatcatgcacgtgacag

SEQ ID NO: 458 - DNA, 445 bp, Homo sapiens
  misc_feature 324, 372, 388, 396, 431: n = A,T,C or G
gaaaaatataaagccaaaaattggataaaatagcactgaaaaaatgaggaaattattggtaaccaatttattttaaaagcccatcaatttaatttctggtggtgcagaagttagaaggtaaagcttgagaagatgagggtgtttacgtagaccagaaccaatttagaagaatacttgaagctagaaggggaagttggttaaaaatcacatcaaaaagctactaaaaggactggtgtaatttaaaaaaaactaaggcagaaggtttttggaagagttagaagaatttggaaggccttaaatatagtagcttagtttgaaaaatgngaaggactttcgtaacggaagtaattcaagatcaagagtaattaccancttaatgtttttggcnttggactntgagttaagattattttttaaatcctgaggactancattaatgggacag

SEQ ID NO: 459 - DNA, 426 bp, Homo sapiens
  misc_feature 10, 345, 363, 400, 401: n = A,T,C or G
cctatgatancttctctagctatcatactccaatcagcaaaaaatgagaaaatgttgagaaatagaagataattcctcatttaaggccaccttctagaatttgtgcttaagattctgctttcttctcatgggccagcacttcggcaactggcaaaaattaggtgtacagggatctaggtaatactgtttatttgagcaataatatattgtgctaacgttcaggcatcctattactgagaaataagggaaaatgagtgtaaagtacaactaagagtctcggcgacagggaaaaataccatcagttaaatatccatagtcctagagcatttatgtaaaactgcaatntgaatcctgcaatacatnttggctttttccctcagtgataccatgtgagggaagnngctctgtcaaggcgggccggataga

SEQ ID NO: 460 - DNA, 348 bp, Homo sapiens
  misc_feature 147, 184, 203, 288, 294, 308, 312, 313, 316, 333, 345, 347: n = A,T,C or G
ccaaattttaaaatgttatttttcatatcatttataaccttgtcacaatccacttaaagaagtttggttatatttcactgaaaattttcttccagagtaggttttttttcgtgggttggggggtaactttactacaattagtaagtntggtgcagaatttcatgcaaatgaggagtgcagcagngtgataatttaaacatatntaaacaaaaacaaaaaaaatgaatgcacaaacttgctgctgcttagatcactgcagcttctaggacccggtttcttttactgatntaaaancaaaacaaaaaaantaannacnttgtgcctgaaatgaancttgtttttttntna

SEQ ID NO: 461 - DNA, 378 bp, Homo sapiens
  misc_feature 370: n = A,T,C or G
ccactaagacagaacggaatctagtagaagtgcaccaatgcttcagtccctcctactcagcatggtgagcagtggtcaatctgtgccctgtggaatgatgggcagataattctggcatgtgtaaataataataaataattcacttggtgcaggcagtatgtctatgaattaaaacctagtgtgtacacagtgcctacatgtgttacagccccacagtaggaatctacaccaaaatatttattagaaggaatttggtccgtactacatcacgctttccggagggtaaaaaataaagtccatctatagacatttcaccacagacccagagactgagtctggctaaaacctgcaaaatgtctataacaaaagnggatggct

SEQ ID NO: 462 - DNA, 197 bp, Homo sapiens
  misc_feature 59, 72, 81, 99, 105, 112, 120, 137, 140, 155, 158, 163, 182,190: n = A,T,C or G
gcgaggtccacactattaaaagctgttgggtaattgaaggtgatataaaatgactgtcntcatttggagtgngcagcacanttacttcatgttgctcangtttanaacaatntcccctgnaagttctcacacagatnggnagaaatcatacctanttntggtnaatcactatggcagccgtngaagaatntaagaga

SEQ ID NO: 463 - DNA, 279 bp, Homo sapiens
  misc_feature 13, 18, 26, 28, 43, 164, 175, 200, 201, 203, 219, 222, 230,246, 262, 263, 267: n = A,T,C or G
cataagtgatgangaggnaaaatcantnaataagcctacaacntagaatacattaaaacttgcacatatacatgttcacagcatgtatacaatgataatccctacggtttaaccaagttatggttcccttctacagcagacacaaaaccaaggtgaactaggtnggcagatgtanagggaataccaaaaaaagggtaatnngntcactgattctgaagnatntgactgancatactgagcttctgnactttgggaatgcatnnaggnaacaatatcttg

SEQ ID NO: 464 - DNA, 552 bp, Homo sapiens
  misc_feature 266, 287, 395, 444, 460, 481, 487, 493, 512, 520, 532, 549: n = A,T,C or G
gatgggttgataggtgcagcaaaccaccctggcgcatgtttaccaatgtaacaaacctgcacatcctgcacaggtactccaaaactaaaagtaaaaaaatctaaaagaaaaaagaaaaagaattaaacccaaaatcacttccccatctggacttgatttagatgaaaagcttctggactttgagctgatgctatagtgggttgaaaattttggggtcctcagaaggggatgaggatatattgcatgagagagcaacatgaatcatngagagccagagtatagagagnggtgggtagactgtaggagagccctcaatgatcccggctgtcttgtattcgcgttgcacttacttgtataatatggcagatgggatgtgatgtcactttcaagattangttataaatagactatggcttcaatcagagggttttcttctctgtctanctctcttttgggtagnttcattctgagagaaagccanacctcngccgcnacccacgctaaggggcganttccagcncactggcggccngttactagtggatccgngct

SEQ ID NO: 465 - DNA, 444 bp, Homo sapiens
  misc_feature 124, 326, 360, 369, 388, 394, 399, 413, 415, 438, 443: n = A,T,C or G
ccactcttggtagaaaccttgaaactttcaccttgctgggctttagcaaagtttccttttacagttctgtttatgagcttcagctactgataaagcacttcctgaacttctctattatcatagngaccctctgaataacctgagtgactggctcggcaattcgctttataaccattcttattcccaaagttggagcacataaacatttagatgtcttttcctgtaaaatattctagacatttacccaaactctagttcaacatatactcaacttgcactgtatatctccctgcttttttgagacagagaagaaattcaggaggtgncccatctccagagtttctctgttggaaagcagcnatcaagaancctttaaaaaattggtgtnaagctntgccncctgcagaaatgcntngccccacattattcttctggggnaaagna

SEQ ID NO: 466 - DNA, 381 bp, Homo sapiens
  misc_feature 265, 325, 326, 338: n = A,T,C or G
cctactatgggtgttaattttttactctctctacaaggttttttcctagtgtccaaagagctgttcctctttggactaacagttaaatttacaaggggatttagagggttctgtgggcaaatttaaagttgaactaagattctatcttggacaaccagctatcaccaggctcggtaggtttgtcgcctctacctataaatcttcccactattttgctacatagacgggtgtgctcttttagctgttcttaggtagctcgtctggnttcgggggtcttagctttggctctccttgcaaagttatttctagttaattcattatgcannaggtataggggntagtccttgctatattatgcttggttataatttttcatctttc

SEQ ID NO: 467 - DNA, 95 bp, Homo sapiens
  misc_feature 7, 11, 15, 46, 69, 74, 77: n = A,T,C or G
cctatanattntggnttgtatactgggtcctgaaaaccctcttggngctctgtttttaaggagctgaanccaangancgccaataataatacttt

SEQ ID NO: 468 - DNA, 224 bp, Homo sapiens
cagtgggtctctgatgccttgcctgcagcagaaggagggagcagagatcaagaggaaggaaaaaatcatatgtacttatttgaaggtaaagattattctaaagagcccagtaaggaagacagaaaatcatttgaacaactggtaaaccttcagaaaacccttttggagaaagctagtcaagagggccgatcactccgaaataaaggcagtgttctcatcccagg

SEQ ID NO: 469 - DNA, 416 bp, Homo sapiens
ctgagttctagttcaaaagctttatccttaacttcgtcatgtactatgtaaattctagaatagaaaagggaaaggtaagattttggtaacctccaaacattgaagtagttcacagacccaaagtcagtacaaattagaatgtccatccataataaaagtatctataaaattacacagacacattctacatagtatttaacattagagaagacaaattacacagggactgaaataaaatgaaacatctactctcccgacaaatgttgaatatacctaatcaacccaagttcagtttatttttgcacattgctttagagatataacttggctgggcacagtggctcacacctgtaatcccaacactttgggagaccaaggcggatggatcacttgaggtcagttcgagactagcctgg

SEQ ID NO: 470 - DNA, 376 bp, Homo sapiens
caccttttaactgtatcacaaagtctgttgctgtggttacagcctttgtttccagtgatgttttgtccatgctttcccccaacccttaacaatggttactcaaaagaatgaaataatgagtcattcattcgggaatatgttaaaatatccctctttatcattacatttcactgcttagaaactaggctgtaattcaaggcaacagttaagtctgagaactgttaaaaaaatctttgattttttttcatttttaagaaaaacctgcctatttaattgttcagacttgtaagaggttcttcaattacatcctttttggttaatgtattatttctggaacaagtagataaaattctacgcagtaagcataataaaaatc

SEQ ID NO: 471 - DNA, 357 bp, Homo sapiens
ggcttcgtataatggttcttttgtcacccctgatcgacgatttcgctacccgtacaactctgacaagggaacgaaatgcttctgtgtattcacctagtggtcctgtgaacagaagaacaacaactccaccggatagtggagtactgtttgaagggttaggcatttcaacaagacctagagatgttgaaattcctcagtttatgagacagattgcagtaaggaggccaactacggcagatgaaagatctttgcggaaaattcaagaacaagatattattaattttagacgaactctttaccgtgctggtgctcgagttagaaatattgaagatggtggccgctacagggatatttcag

SEQ ID NO: 472 - DNA, 557 bp, Homo sapiens
  misc_feature 2, 29, 213, 428, 515: n = A,T,C or G
cngagatgacatttacaatctcttgaaangcagcagatggcactctggtgcttcctatgaagcaacatgcttgaaatcaagggccaacaattgttgtaggaaagcaaaatatacctctaacacctacgtttaccaaaaaagctgacatctcaaactctgagttgttgagactcaaatttctcatccccaaagaagcctattacggtagtgtgntggatgctttttgtatctctgataggcaggcactataatggggggaaatacttctgaataaaaacattggctgtcttgcaactgtgcatataatgtctattcaagggggcagtgtgcctagcatgatcctgaaatgttgagataaaaggaagttggcattaaagcactatttgtcttatatgaaaagagtgactctatcttccagtaaacaaganttcctgcaatgaaaaagaaattttttccttcattatctataaactatacaaaataaccttcctttttaacctaagactcaaacattnatatttgattttattctatttgataccaattggtatgtccag

SEQ ID NO: 473 - DNA, 264 bp, Homo sapiens
cctccatcaacagaaaggataaagaccccttcgggtctcctcattaattctgaactggaaaagccccagaaagtccggaaagacaaggaaggaacacctccacttacaaaagaagataagacagttgtcagacaaagccctcgaaggattaagccagttaggattattccttcttcaaaaaggacagatgcaaccattgctaagcaactcttacagagggcaaaaaagggggctcaaaagaaaattgaaaaagaagcagctcag

SEQ ID NO: 474 - DNA, 165 bp, Homo sapiens
aattcagcttccagaggcccttattagtccttgttgacagaaacatagatttggcaactcctttacatcatacttggacatatcaagcattggtgcacgatgtactggatttccatttaaacagggttaatttggaagaatcttcaggagtggaaaactctccag

SEQ ID NO: 475 - DNA, 417 bp, Homo sapiens
  misc_feature 370, 372: n = A,T,C or G
aagttctcttcttgttttaaacacattcctgataacttctaaagatgaccaaaataaaacagaatatctacagagatcattttctgaattttttgtacatccaaggataacaacataaaaaaaataaaactggacagcattccacatccaagtgcacagaaccatttttgcaagattaaataatgtaaacattgggaacagccaaatcagcgaagaatgccaacacctcaaaacacctggtgttgccgcttcattaagtggttcaaaatccagatctataattgcgcaatattcaccgtatataaaaagaaatggatattaattttgacaaatagctgcaactgagacttctttttatttctttatatgngnatatagtgaatttttattatttttaaaattttatttattttttta

SEQ ID NO: 476 - DNA, 321 bp, Homo sapiens
  misc_feature 36, 87, 102, 158, 170, 193, 196, 263, 291: n = A,T,C or G
catttaataacaaaaacaacctgtacggaaaacccnaaggcaaccacatagcatatgtaaaatgtgcaaatacactttaaaatgcangttattctatagcanttgcaagatagaatttcactgtaattagggaatctagctcatcctaacttaatagncttttgcatgtntagacaatgcaattctacaaggnacnactcagcgttgatgctaaagtatgaaacacatcctcagattattcatccgaaaatattaaaatagcntcatgttttattattctttaatgagtcntgagctcatttctaaagcttcataaagcat

SEQ ID NO: 477 - DNA, 546 bp, Homo sapiens
  misc_feature 546: n = A,T,C or G
gctgtggttatattgtaaatgaagcatctaacatgtgcacaacttgcaacaaaaactccttggactttaaatctgtctttctcagtttccatgtgctgattgatctgactgatcacacaggcacccttcattcctgtagtctcacaggaagtgttgctgaggagactttgggctgcacggtacatgagtttcttgcaatgacaaatgaacagaaaacagcattaaagtggcaattcctcttggaaagaagcaaaatttatttaaaattcgttctatcacacagagcaaggagtggattgaaaattagtgtactctcgtgcaagcttgcagatcctactgaggcaagcagaaacttgtctggacaaagacatgtttaaaacggtctatcattttgaactctggaaaagtataagagttttaactccctttaaaatggaatattaatttgaaaattatggggaaaattgcattttgtttacatgtggtgaacatgtttctagaaattggtatggcgggaagggggctgggtgagtctgaaggacctcn

SEQ ID NO: 478 - DNA, 100 bp, Homo sapiens
aagaaaagtggtaaaatcaagtcttcttacaagagggagtgtataaaccttggttgtgatgttgactttgattttgctggacctgcaatccatggttcag

SEQ ID NO: 479 - DNA, 508 bp, Homo sapiens
  misc_feature 2, 3, 423, 505: n = A,T,C or G
gnnttccaaattcttctaactcttccaaaagccttctgccttagttttttttaaattacaccagtccttttagtagctttttgatgtgatttttaaccaacttccccttctagcttcaagtattcttctaaattggtcctggtctacgtaaacaccctcatcttctcaagctttaccttctaacttctgcaccaccagaaattaaattgatgggcttttaaaataaattggttaccaataatttcctcattttttcagtgctattttatccaatttttggctttatatttttctatcttctatacttctccaatacttgtcttagcttgtttttcattttctatctgaaactcttgacaatatcttctaatttccctatcttctctattcttttcttcgccttcccgtacttctgcttccagntttccacttcaaacttctatcttctccaaattgttcatcctaccactcccaataatctttccattttcgtgtagcacctggncag

SEQ ID NO: 480 - DNA, 81 bp, Homo sapiens
ggtgcccttttcctaacactcacaacaaaactaactaatactaacatctcagacgctcaggaaatagataaggaaaatgac

SEQ ID NO: 481 - DNA, 306 bp, Homo sapiens
  misc_feature 30: n = A,T,C or G
tcgccttcggccgccgggcaggttaggggnacaagacgctacttcccctatcatagaagagcttatcacctttcatgatcacgccctcatagtcattttccttatctgcttcctagtcctgtatgcccttttcctaacactcacaacaaaactaactaatactaacatctcagacgctcagggaatagaaaccgtctgaactatcctgcccgccatcatcctagtcctcatcgccctcccatccctacgcatcctttacataacagacgaggtcaacgatccctcccttaccatcaaatcaattgg

SEQ ID NO: 482 - DNA, 582 bp, Homo sapiens
  misc_feature 92, 155, 262, 369, 393, 413, 430, 451, 452, 460, 463, 467,471, 474, 486, 516, 554, 558, 562, 565, 569: n = A,T,C or G
ggggggaacagtcattatacattatttagactcattccttcttccagtgcccttatgattatttcctacctttaccattgatcttaaactgngcaggctaaaaagaggaaccagaactcccttaagcacttttaagactatttaaaaaataaagntttgttggcattgaagagtaagctgcttaagggactgaatgaaaagatagtaccctttgtggctgtatgaagagagaaactgaatttctatccaagagaccttaatntagcctattagggaattatcttccccaaaagtacaagtaattttgcactgcaggagaaggataagtagatttgatttacatcacattttatacacacctttcaaganggagaaatctgcttcataaatagnaggaatctatgcttaaactnaacatttaatggtgacntcttacaacagccttgaaaannattggaantcngacntganggnggaaactggaanaaagaatatctttctcttctgcatcctttnatcctcaaacttagcatggattcacacgctgaggaaangttnggtnacnaccngaacatttagata

SEQ ID NO: 483 - DNA, 275 bp, Homo sapiens
  misc_feature 251: n = A,T,C or G
gcctcactaaaataacagatttcagtatagccaagttcatcagaaagacccaaatggaatgatttacaaaatagaacactttaaaccaggtcagtcctatctttttgtagctgaaggctatcagtcataacacaatttcgcgtacacctctgctcattatggaattacacttaaaacgaatctcaagagggtgaccattgttgtttcagataccatccctaaggagagtggttaacaggaagattgccagngttactgatggaaagaagcgcttg

SEQ ID NO: 484 - DNA, 434 bp, Homo sapiens
catatttccacaggccaatttctttctgtttttctgctaagctatttcagcattttagcttttcctctttgctttgtttactcatgattgccagatggctacgttacctctaagcatcagatcctcacaaattaatggttaaatgtaagggagggattttactctcttgcattaaaaaaaagctttattgagatataatttactgtaacattgactcatttaaagtatgctagtcaatagaccaaatcttgaataaactcccattcacaattgctacaaagggaataaaatagctgggaatatagctaacaagggaagtgaagggcctcttcaaggagaactacaaaccactgctcaagaaataagagaggatacaaacaaatggaaaaacattccatgctcatgaataggaagaatcaatatcgtgaaaatgg

SEQ ID NO: 485 - DNA, 291 bp, Homo sapiens
  misc_feature 1: n = A,T,C or G
ncaccactgcagccctacatacagttgaaaaaaaattccattctgttaacatttgttttataagttttcacgcaatacacaaaaaacccctctgcacttcttgtaaagaacaaaaaagatacacaacagttaagcgtaaagatcacaggcaatagcattcaaacatggatgtgggtagagaaaggagtacctggcatgagtacctgcttagtttgactgaatccttgatttttaatttggcttttcatgggccgctcacaacaccaacgctgtgtgaggtatggtagtcag

SEQ ID NO: 486 - DNA, 274 bp, Homo sapiens
ctgtaatattgtagttgctccagaatgtcaagggcagcttacggagatgtcactggagcagcacgctcagagacagtgaactagcatttgaatacacaagtccaagtctactgtgttgctaggggtgcagaacccgtttctttgtatgagagaggtcaaagggttggtttcctgggagaaattagttttgcattaaagtaggagtagtgcatgttttcttctgttatccccctgattgttctgtaactagttgctctcattttaatttcactgg

SEQ ID NO: 487 - DNA, 184 bp, Homo sapiens
  misc_feature 86, 132, 137: n = A,T,C or G
tggcaccaagattctcagctcacggtaccagcatctgattgtcggactacctgctgctttccctgatatttatacatgatattcgnaaaatgtaaagaagctattattcatacagacatctagagaaggagngaagnttttaaaaaaataaaaaaatacttatttcaagctttagctgtgttct

SEQ ID NO: 488 - DNA, 393 bp, Homo sapiens
ctgcatttttattgcgatctgcagatgaactggaaaatctcattttacaacagaactgggacagacgaccaccatattcactgaggtctaaatttgcagtttccactaatgacattttgatttcccaacagagatacttctggtcttactgcacagtcttttaagagaaatacttccattatgccacattgtccttgatccgtaagtgatgtgttaaggtgcttcaaaggaactctgacctctgaagtacttgagctactttagtatgtccagcctattgctttttgttttagtgtgtcaccataaatatcaggggcataaaaggctatctattcttaattcaaggataaaacagaagaagcttgtggtataaaacaatagttcaagatccag

SEQ ID NO: 489 - DNA, 607 bp, Homo sapiens
  misc_feature 46, 270, 440, 515, 558, 579, 580, 602: n = A,T,C or G
gtgcttatgtacttaaggggaactactctaactgggtgaagagtangatgaagcatccatgtccctacaaaggatatgaactcatccttttttatggctgcatagtattccatggtgtatatatgccacattttcttaatccagtctatcatcgatggatatttgggttggttccaagtctttgctattgtgaatagtgtcgcaatgaacatacatgtgcatgtgtctttatagcagcatgatttataatcctttgggtatatacccagnaatgggatagctgggtcaaatggtatttctagttctagatccttgtggaattgccacactgtcttccacaatggttgaactagtttacagtcccaccaacagtgtaaaagtggtcctatttctccacatcatctccagcacctgttggttcctgactttttaatgattgncattccaactggtgtgagatggtatatcaccgtgggtttgatttgcatttccctgatggccagtgatgatgaacnttttttcatgtggtttttggctgcataaatggcctgccttttntacttctataaaatttttcanntcttattattattcctgggggnttaag

SEQ ID NO: 490 - DNA, 179 bp, Homo sapiens
  misc_feature 76, 102, 131, 169: n = A,T,C or G
cttctaggaatactagtatatcgctcacacctcatatcctccctactatgcctagaaggaataatactatcactgntcattatagctactcccataaccctnaacacccactccctcttagccaatattgngcctattgccatactagtctttgccgcctgcgaagcancggtaggacc

SEQ ID NO: 491 - DNA, 399 bp, Homo sapiens
  misc_feature 41, 156, 371: n = A,T,C or G
cctctacctgtaatcacattaatttttctaaagacaggggnggtgttttgaagataaatgtcattagtctatgataatagcatcataggacaattagccattttagacttgaccatattttctctttttagcatatagccatcttgatatttaggngggagactactccaatggagcaacagtttcattttacatgattggatttagaaatttacaaattttaaactcataagaattctaaataatttgaaaatggaaacatttgacccacagtctagcagcataaatacatttataaaatacttcattgttgatcttaggtcattgatttaaaacagaatttggtgactatgggcaggtggagggggccngtgaggaaggtataaaagagaaatcttt

SEQ ID NO: 492 - DNA, 482 bp, Homo sapiens
  misc_feature 39: n = A,T,C or G
ctccaccttactaccagacagccttagccaaaccatttncccaaataaagtataggcgatagaaattgaaacctggcgcaatagatatagtaccgcaagggaaagatgaaaaattataaccaagcataatatagcaaggactaacccctataccttctgcataatgaattaactagaaataactttgcaaggggagccaaagctaagacccccgaaaccagacgagctacctaagaacagctaaaagagcacacccgtctatgtagcaaaatagtgggaagatttataggtagaggcgacaaacctaccgagcctggtgatagctggttgtccaagatagaatcttagttcaactttaaatttgcccacagaaccctctaaatccccttgtaaatttaactgttagtccaaagaggaacagctctttggacactaggaaaaaaccttgtagagagagtaaaaaatttaacacccatagtagg

SEQ ID NO: 493 - DNA, 207 bp, Homo sapiens
  misc_feature 35, 37: n = A,T,C or G
cataaatattatactagcatttaccatctcacttngnggaatgctagtatatcgctcacacctcatatcctccctactatgcctagaaggaataatactatcactgttcattatagctactctcataaccctcaacacccactccctcttagccaatattgtgcctattgccatactagtctttgccgcctgcgaagcagcggtagg

SEQ ID NO: 494 - DNA, 283 bp, Homo sapiens
  misc_feature 38: n = A,T,C or G
ccaattgatttgatggtaagggagggatcgttgacctngtctgttatgtaaaggatgcgtagggatgggagggcgatgaggactaggatgatggcgggcaggatagttcagacggtttctatttcctgagcgtctgagatgttagtattagttagttttgttgtgagtgttaggaaaagggcatacaggactaggaagcagataaggaaaatgactatgagggcgtgatcatgaaaggtgataagctcttctatgataggggaagtagcgtcttgtagaccta

SEQ ID NO: 495 - DNA, 590 bp, Homo sapiens
  misc_feature 584: n = A,T,C or G
tatgtatataattttcttagttactagcatagagaaattactgatttaaaaaaacatttcaaattctagcatgttgtaggattctattgccctttctaaaaagtacatcttgcttatccgatttctaacaaaactatttaatttgaagaagggagaatgaatttggataaaaagcaaaaatttaaaggtactcaaatttaggcaaaccattaaagcaatcttagtttacagttaattgggtagaatggtcaacactttcttcaggttagttcatggagtggatatgcattgatagaacaacttagagatgcttttacagttgagaaagctcattatatttgttatctttaagaatcagcttatttatttcatatgtttgttctttaagaagaccaaagagccctgcaaatgaatgttgatttgtttttttgtttgtttaatatttttgtagagataagatctcactttgttatgttgcccaggctggtctcaaactctcaacttgaagtgatctgcccacctcagcctcccaaagtggtgggattacaggcatgagccaccgcacctggacctgcccgggcggncgctcg

SEQ ID NO: 496 - DNA, 307 bp, Homo sapiens
  misc_feature 20, 22, 25, 34, 118, 119, 155, 167, 169, 178, 188, 201, 212,230, 245, 259, 260, 268, 300, 307: n = A,T,C or G
ggagattagtatagagaggnanacnttttttcgngatatttggtcacatggataagtggcgctggcttgccatgattgtgaggggtaggagccaggtagttagtattaggaggggggnngttagggggtctgaggagaaggttggggaacagctnaataggttgttngntgatttggntaaaaaacantagggggatgatnctaataattantgctgtgggtggttgtgntgattcaaattatgngctttttcggaganncatgtcangtggtagtaaatataattgttgggaccattanttcttan

SEQ ID NO: 497 - DNA, 216 bp, Homo sapiens
  misc_feature 34, 35, 37, 124, 150, 176, 179, 183, 185, 188, 200, 203, 213: n = A,T,C or G
cattttcctcttggtttcttcagttaagtcaaanngncacgttcctctttccccatatattcatatatttttgctcgttagtgtatttcttgagctgttttcatgttgtttatttcctgtctgngaaatggtgtttttttttgttgttgntggtttttttttttttttttaaactnggnaccncnaanttgaaaaaatgnttntttttccctnaca

SEQ ID NO: 498 - DNA, 375 bp, Homo sapiens
  misc_feature 36, 37, 155, 227, 239, 242, 253, 279, 283, 286, 325, 330,337, 340, 349, 356: n = A,T,C or G
gaatttcctggcaccttttctcgctagagaagattnngtgtgactgggttgcctataagccatatagatacaaacttttatctctaataccaagtcttagagggatatattaatagatctaataaatttattcttagacttattgtttcatgggntagtgagtctttgctactggagacaatacagacttgtcagtttttttaaaaaaaaaaaatttgccaagctancacattaaaaanatntcctaaggctntcattttatgaggatgattataaacntttntgngataaatatcaccataataaactgttaagtacaactgcnggccncccttanagngaattcctncagttanaaatttatttttttgccaa

SEQ ID NO: 499 - DNA, 215 bp, Homo sapiens
  misc_feature 5, 39, 40: n = A,T,C or G
ccacnaaagcagaagcttaaagcatagtagtaaagaggnnaaaaagaaggacgaaaataaatcagatgacaaggatggtaaagaagttgacagtagtcatgaaaaggccagaggtaatagttcactcatggaaaagaaattaagtagaaggttgtgcgaaaatcggagaggaagcttgtcacaaaaaaaaaaaaaaaaaaaaaaaaaaatgtttt

SEQ ID NO: 500 - DNA, 489 bp, Homo sapiens
  misc_feature 38, 239: n = A,T,C or G
ccactacgataagcaggtagctgggttttgtagtgagnttgctccttaagttacaggaactctccttataatagacacttcattttcctagtccatccctcatgaaaaatgactgaccactgctgggcagcaggagggatgatgaccaactaattcccaaaccccagtctcattggtaccagccttggggaaccacctacacttgagccacaattggttttgaagtgcatttacaaggnttgtctactttcagttctttactttttacatgctgacacatacatacactgcctaaatagatctctttcagaaacaatcctcagataacgcatagcaaaatggagatggagacatgatttctcatgcaacagcttctctaattataccttagaaatgttctcctttttatcatcaaatctgctcaagaagggctttttatagtagaataatatcagtggatgaaaacagcttaacattttaccatgctta

SEQ ID NO: 501 - DNA, 286 bp, Homo sapiens
aaaaacactcaaacacagccttggagggaggagtcagttttaaaagactcttataaaagtaatatactgctagctctgaagaatcggaggctaaaatcatctcttcaagtccccagggaatcccaaagaactccaggggaaggtgggatgggccagagagctctggaagcttccaggtctgttgcaagcctcacctggtacacagtaggctcttccaggtctgtcaggaacccaggagcctcccctagcacacagtaggctcacaaaaagggagcactgctgctgg

SEQ ID NO: 502 - DNA, 168 bp, Homo sapiens
  misc_feature 38: n = A,T,C or G
cctatgattgtgggggcaatgaatgaagcgaacagagnttcgttcattttggttctcagagtttgttataattttttatttttatgggctttggtgagggaggtaagtggtagtttgtgtttaatatttttagttgggtgatgaggaatagtgtaaggagtatggggg

SEQ ID NO: 503 - DNA, 173 bp, Homo sapiens
  misc_feature 34, 35, 43: n = A,T,C or G
cctttataataaattaggcaaaaggttcagtgcnnggctatantggacaacatgaaactccataaaaatgactggatagggggactgcttgagacttttcttttgggcattactaacagaattcaaagaaattccaaccacgcttatttttccaaattctactgaaatgagag

SEQ ID NO: 504 - DNA, 310 bp, Homo sapiens
  misc_feature 127, 259, 273: n = A,T,C or G
tagtattctatttaaaaattaagttttggggtctgtaaaatatacaggacaatgacttttttaaaatgtaagttaatacctcctcctcacttgtcttaattgaacttaggtgtttattcttaaaggnggaccttgatgaaaatgttgagatgggaagtgttattaggcaaaacttgttatagatttctcatataactcttaattgacccttagaattttaacaaccgcgcctggcccaatagactgttttttagagtanttttaggctctcancaaaattgaggggaaaatacagggtgttcccattaaa

SEQ ID NO: 505 - DNA, 530 bp, Homo sapiens
  misc_feature 527: n = A,T,C or G
cctcagggaacttacaattatggcaaaaggggaaggggaagcaagcaccttcttcacaaggcatcaggagagagagagaaagagagtaggggaaactaccccttttaaaccatcatatcctgtgagaactccctcagtattagaagagcatgagggaaaccgcctccataatccaatcacctcccaccaggaccatccctcaatacatgggggttacaattcaagatgaggttcgggtggggatacagatttaaaccatatcagaatggttaatgatattgttgtattttaccaactataatcttcttagtgttatagtacaataatgtaaaaaattgagtaaatttgttttctatattattctgtttttggaaaacatgtatatagtcagggctgtttgtctcaagaaaatatggtaaactctgctgttttggtcactggtgcctagaatttggggatgtacattggttttgattcacatgcacatttccttctagttcacagtaactatttctaactatttcccnata

SEQ ID NO: 506 - DNA, 352 bp, Homo sapiens
  misc_feature 50, 175, 336, 337: n = A,T,C or G
cttgaacgctttcttaattggtggctgcttttaggcggtactatgggtgntaaattttttactctctctacaaggttttttcctagtgtccaaagagctgttcctctttggactaacagttaaatttacaaggggatttagagggttctgtgggcaaatttaaagttgaactaanattctatcttggacaaccagctatcaccaggctcggtaggtttgtcgcctctacctataaatcttcccactattttgctacatagacgggtgtgctcttttagctgttcttaggtagctcgtctggtttcgggggtcttagctttggctctccttgcaaanntatttctagttaatt

SEQ ID NO: 507 - DNA, 370 bp, Homo sapiens
  misc_feature 35, 186: n = A,T,C or G
cctaactagatcttatcagaataggggggaagggngtcggttcatccttattgagtgttaatgaccctgtaagatgtaatttcttttatttcattctgttacctagaaaatctatcacagccttgtagtattgattgctcaatctataaagagctcagtttacagcatgactgttagtaacagggntattttaatgagtgactcttcaacacctcagagtttcactaaattccaacccatcagcccagtagtctaacattaagggtcttaggaaatgagaacttatcacctttccttatcatgaaaaggtaacctccaggtaaccaaaaatagaacttcctctgtgttcgttttttatagaaattactgg

SEQ ID NO: 508 - DNA, 129 bp, Homo sapiens
  misc_feature 37: n = A,T,C or G
ctgttaaaagaacaaacttagcaatatataacagttnggtaacaggatttttgactattcactttgggagttatttttaaaaatccacttttttactgagtcttactacataccaggcactgtacttgg

SEQ ID NO: 509 - DNA, 422 bp, Homo sapiens
  misc_feature 1, 52, 105, 107, 166, 176, 197, 232, 239, 241, 252, 255,280, 365, 416: n = A,T,C or G
ntgggaagtcgtgacatccatgggaacccagcgctgtgatgctggtgtttgngttctccgcgagaagtgaccattgttggagcaccatccagagctagtgaccantncagtggacagttagtgggagaatcaaaaatcctttccagaatgtctgtttctcactacntgcaccgggngattacaggcaccagtgcagngatgattgtacttatttgacacatactccccgtcntcctggntnttgttcctganaanggtgggtaaatattccaggaaaaanaatgcacattgaatggatgtgagagaccacattgcctctcccactgctttggggagcactttcctgtcatttctaacttaccacntgcttggtgtactatatgtatgttgtgcctcatatgttgcaaagaactaangtgagt

SEQ ID NO: 510 - DNA, 238 bp, Homo sapiens
ccacctatgaattggtggtttacctactcaatggatagcagcacgaggactgctgtactgcacaaaaagaagaccaaaagattacagtggaccatgggatacagaagccagcatggcagacagaagaaaaatagtttgggaacatgtaactatcctaagtggaagttttgttgtaggaattatagtaatcacaccacattacttggcctttcggtaatgtgaaaaaaaaaaaaaatcc

SEQ ID NO: 511 - DNA, 254 bp, Homo sapiens
  misc_feature 3, 34, 169, 228: n = A,T,C or G
ccnattgatttgatggtaagggagggatcgttgnggctcgtctgttatgtaaaggatgcgtacggatgggagggcgatgaggactaggatgatggcgggcaggatagttcagacggtttctatttcctgagcgtctgagatgttagtattagttagttttgttgtaagngttaggaaaagggcatacaggactaggaagcacgataaggaaaatgactatgagggcgngatcatgaaaggtgataagctcttct

SEQ ID NO: 512 - DNA, 269 bp, Homo sapiens
  misc_feature 38, 49, 103: n = A,T,C or G
cctacctgtaaactacagtactttatatatctatgggnttaataaaaanaaaatccacaaatcttaaaaaggaactttaaatgcagggctatattgaattggnaaactgcaacacaaactggcgcaacataggtaaatgaataccaatctcactctatgtgatgcaagcatgctactttcccactaatttaaattactttcaaccactatgagccagaatgcatgcctgaaccttaaactgcactttaaaaagtaacatcttggcctaa

SEQ ID NO: 513 - DNA, 266 bp, Homo sapiens
  misc_feature 34, 79, 137, 149, 154, 157, 217, 245, 251: n = A,T,C or G
ggaggggggttgttagggggtcggaggagaaggntggggaacagctaaataggttgttgttgatttggttaaaaaatantagggggatgatgctaataattaggctgtgggtggttgtgttgattcaaattatgtgntttttggagagncatgncantggtagtaatataattgttgagacgattagttttagcattggagtaggtttaggttatgnaccgtactctaggccatatgtgttgganattganactagtagggctagg

SEQ ID NO: 514 - DNA, 271 bp, Homo sapiens
  misc_feature 9, 32, 33, 39, 51, 52, 61, 62, 65, 75, 108, 112, 120, 123,127, 129, 132, 141, 142, 157, 173, 179, 210, 219, 220, 224,231, 232, 235, 240, 242, 245, 251, 259, 266: n = A,T,C or G
acatgcaanaaatcgagaatcttaaaaaacannacgaanctgccctggaanncttactggnntangatatttatnttgcggctgagatacttgaacaacttcggatcngaantagacaanaangggnanttntatactgcnncagaggttacacagntcattgtattagagangaacanatgggtctggtgttcacacattggggggaanatgggcgtnnacangagaggnnganaaacnanganagcctncctggttngcataanaaaaa

SEQ ID NO: 515 - DNA, 328 bp, Homo sapiens
  misc_feature 23, 25, 32, 64, 112, 125, 149, 157, 202, 216, 245, 256, 267,297: n = A,T,C or G
ccaatgaggggcaaagtgagcgncnagaagangttttgactgaaataaatcaaacacaaaaatntaagttcacagtgacagtttaaacaaaatccaaacaaactaacaacanaaacaccccttgntttgcctctagtggaaggtggganaacacaanctcgtcctaaaaattgactagtaaaggggaaaacccggtcatttncctactctttccangaaatatctaatgcaagaaagaacttctnctcattatacngaaggaatttngaaaaatgatgtatttttggaacacctaantgaaatactggaacctgggcaagttcaccac

SEQ ID NO: 516 - DNA, 220 bp, Homo sapiens
  misc_feature 1, 5, 52, 118, 162, 168, 174, 195: n = A,T,C or G
ncctnagttgaaggaccccatgtacatacaggccaggggagcagtactaggntaactagaaggatctcatccccatatgtgggctcatttcaagtctatggatgactaccttcattgntgtgtgcgagatggtttcaccccttgaaaatatgggcacttcancataanatagcnaaatctttataatgatcaatncatcctacctccttttacatgcatg

SEQ ID NO: 517 - DNA, 296 bp, Homo sapiens
tgcgatttcttccttgttgtttgctttggtctgtgttcaatccagagagcttaaattgtcattattttgggaagaaaacctgtatttttgttagtttacaatattatgaaatttcacttcaggagaaactgctgggcttcctgtggctttgttttcttagtttctttttccgtgccgtgtattttttaattgatttttcttcttttacttgaaaagaaagtgttttattttcaaatctggtccatatttacattctagttcagagccaagccttaaactgtacagaatttccactg

SEQ ID NO: 518 - DNA, 299 bp, Homo sapiens
  misc_feature 36: n = A,T,C or G
gaagatagaaaaatataaagccaaaaattggataanatagcactgaaaaaatgaggaaattattggtaaccaatttattttaaaagcccgtcaatttaatttctggtggtgcagaagttagaaggtaaagcttgagaagatgagggtgtttacgtagaccagaaccaatttagaagaatacttgaagctagaaggggaagttggttaaaaatcacatcaaaaagctactaaaaggactggtgtaatttaaaaaaaactaaggcagaaggcttttggaagagttagaagaatttggaagg

SEQ ID NO: 519 - DNA, 464 bp, Homo sapiens
  misc_feature 455: n = A,T,C or G
gctgcacatcggaggaaaactcggtaaagcagaatgaggttgatatgttgaatgtatttgattttgaaaaggctgggaattcagaaccaaatgaattaaaaaatgaaagtgaagtaacaattcagcaggaacgtcaacaataccaaaaggctttggatatgttattgtcggcaccaaaggatgagaacgagatattcccttcaccaactgaatttttcatgcctatttataaatcaaagcattcagaaggggttataattcaacaggtgaatgatgaaacaaatcttgaaacttcaactttggatgaaaatcatccaggtatttcatacagtttaacagatcgggaaacttctgtgaatgtcattgaaggtgatagtgaccctgaaaaggttgagatttcaaatggattatgtggtcttaacacatcaccctcccaatctgttcagttctccagngtcaaaggc

SEQ ID NO: 520 - DNA, 221 bp, Homo sapiens
ctgatatctacttatttaacacaagtctctaatacaatacaattttattaattttattccacatgccccacattagatctctagactcattcatcctacatacctactttgtatcctttgacctacatctccctacttcctcctccagtccccaccccccacccactggtgctaaccactgtttcattccctttttcattctacatatgtgagatcatgct

SEQ ID NO: 521 - DNA, 312 bp, Homo sapiens
  misc_feature 37, 38, 238: n = A,T,C or G
ctgatagctttctcttcgcctagattaatatcttctnncttcccattcacagcccccaccgacatcaaagctttgctgttttatctgtcaaaaatgtcttcacacttttcattcttaaataaaagtgctgagtaaggacattttcacaacaaatttttattttacaaaacttacaatgatttgaatccaaaacaactttcattatttaactgtaaagtaaatatatattttattaggngtgtcttagttcattttgtgctgctttaacagtgtatccttgtgatagttgtggggtgggggaggggggaagga

SEQ ID NO: 522 - DNA, 336 bp, Homo sapiens
ccttctttccccactcaattcttcctgccctgttattaattaagatatcttcagcttgtagtcagacccaatcagaatcacagaaaaatcctgcctaaggcaaagaaatataagacaagactatgatatcaatgaatgtgggttaagtaatagatttccagctaaattggtctaaaaaagaatattaagtgtggacagacctatttcaaaggagcttaattgatctcacttgttttagttctgatccagggagatcacccctctaattatttctgaacttggttaataaaagtttataagatttttatgaagcagccactgtatgatatttttaag

SEQ ID NO: 523 - DNA, 172 bp, Homo sapiens
  misc_feature 1, 5, 9, 11, 21, 49, 56, 60, 65, 66, 83, 88, 92, 113, 129: n = A,T,C or G
ngacnggcncntggctatgtntatagatagggctttaaccactatctgngaagcangagngacannattcttgctctcacatnccacngganacgtatttctcttctcttacnagcgaagaaccatctntttctaaagcccccattctattgcccttgcttttctctggctt

SEQ ID NO: 524 - DNA, 471 bp, Homo sapiens
ccagacctgcagaaaaacttagcacagctcaatctgctgttttgatggctacagggtttatttggtcaagatactcacttgtaactattccaaaaaattggagtctgtttgctgttaatttctttgtgggggcagcaggagcctctcagctttttcgtatttggagatataaccaagaactaaaagctaaagcacacaaataaaagagttcctgatcacctgaacaatctagatgtggacaaaaccattgggacctagtttattatttggttattgataaagcaaagctaactgtgtgtttagaaggcactgtaactggtagctagttcttgattcaataagaaaaatgcagcaaacttttaataacagtctctctacatgacttaaggaacttatctatggatattagtaacatttttctaccatttgtccgtaataaaccatacttgctcaaaaaaaaaaaaaaccttc

SEQ ID NO: 525 - DNA, 332 bp, Homo sapiens
  misc_feature 5, 36, 60: n = A,T,C or G
ccccnctgtattccagcctgggtgaccccatctcanggaagaaaagttaccagatgtcgngggtaaaggttggtcttcaagtggcctcataagttgtcttgcatttaaattcagggaattcattggaccaataggttacattttcgttccttttttgttttggttcatctgttaagcagtgggggcctaattactgctcctttgtaaaaacacattttcccaaagaacactgaattaccgttcaaactggttgttgatgggtaataagggctgtttttgctgccccaaaagggcttaacaatttaggcggatagtttacttaaaaaaaaaaa

SEQ ID NO: 526 - DNA, 440 bp, Homo sapiens
  misc_feature 36, 241, 258: n = A,T,C or G
ccaggttacctcccctaacagatgtggtgttctgangggttggttaagtgcccgaggaaaataggccttaactgttaacatctacagagaagaaagcatggtcacactggcaaggagtaagaagggattgggtaaaagaaaatgggagagaaaagggaaaaaagttttggcaagacaattgttccctgctaagaagctgcagggtgaaagctttcctttcttctatttttgtttttaatgnctgtctctctgatcagnggaaaagtgaaaatttctagtatctagcactaacgtatgacccaactttgagggatcacaagctagaacaagttgaggatttaaaatcctggataattatatacttaaagttcatgagcataaagctcacttgaccatgcagaaatgctgggaagcagggtgcatggcatgggaatacatct

SEQ ID NO: 527 - DNA, 124 bp, Homo sapiens
  misc_feature 30: n = A,T,C or G
tttccatatgtctgttgggtgcataaatgncttcttctgagaagtgtctgttcctatcctttgccccctttttgaggacttaaatgttagacctaagaccataaaaaccctagaagaaaaccta

SEQ ID NO: 528 - DNA, 162 bp, Homo sapiens
  misc_feature 35: n = A,T,C or G
ctgcgggagaaatatggggacaagatgttgcgcangcagaaaggtgacccacaagtctatgaagaacttttcagttactcctgccccaagttcctgtcgcctgtagtgcccaactatgataatgtgcaccccaactaccacaaagagcccttcctgcagcag

SEQ ID NO: 529 - DNA, 409 bp, Homo sapiens
  misc_feature 34, 35, 270: n = A,T,C or G
cctttaaaatatagcttataaaatgtatactatnngccaggagagctcacatttttctgcagttttccagtggacctgcctatggaatactgtaaagaaaaatctgcaaaaatattcctagcaattgaatcagtgcttttaaataaaagaagtggagaggggcttggttaaattattctgacaagttttcttgctagtggttgccaaaattaaggatatttgaagtgtcctatcacccaaatttggctttaagaaaaagctatattctgngtctatagggtgaagcccacactatctgtgctgcattctcaatgatacaatacctatctggaaactttcctgttttgccaatgggtgcacaaatctaaaacattttatcacaaaaggtacttgaatttaaatttctttt

SEQ ID NO: 530 - DNA, 325 bp, Homo sapiens
  misc_feature 39, 47, 96, 254, 264: n = A,T,C or G
ccgccagtgtgatggatatctgcagaattcgccctttcnagatttgngcccgggcaggtccatggctaggattatagatagttgggtggttggggnaaatgagtgaggcaggagtccgaggaggttagttgtggcaataaaaatgattaaggatactagtataagagatcaggttcgtcctttagtgttgtgtatggctatcatttgttttgaggttagtttgattagtcattgttgggtggtaattagtcggntgttgatganatatttggaggtggggatcaatagagggggaaatagaatgatcagtactgcggcgggtagg

SEQ ID NO: 531 - DNA, 173 bp, Homo sapiens
  misc_feature 37: n = A,T,C or G
ccaattgatttgatggtaagggagggatcgttgaccncgtctgttatgtaaaggatgcgtagggatgggagggcgatgaggactaggatgatggcgggcaggatagttcagacggtttctatttcctgagcgtctgagatgttagtattagttagttttgttgtgagtgttag

SEQ ID NO: 532 - DNA, 395 bp, Homo sapiens
  misc_feature 41, 331, 344, 369: n = A,T,C or G
caggtcctactatgggtgttaaattttttactctctctacngggttttttcctagtgtccaaagagctgttcctctttggactaacagttaaatttacaaggggatttagagggttctgtgggcaaatttaaagttgaactaagattctatcttggacaaccagctatcaccaggctcggtaggtttgtcgcctctacctataaatcttcccactattttgctacatagacgggtgtgctcttttagctgttcttaggtagctcgtctggtttcgggggtcttagctttggctctccttgcaaagttatttctagttaattcattatgcanaaggtataggggntagtccttgctatattatgcttggntataatttttcatctttcccttgcgg

SEQ ID NO: 533 - DNA, 290 bp, Homo sapiens
  misc_feature 215, 216, 237, 244, 249, 265, 267, 283: n = A,T,C or G
ctgaaccattatgggataaactggtgcaaattctttgccttctctacttctcactgattgaacataagcttccagggctcccctgaaaaccaaaatgaaaacaatgtcaaaatattagataaatcacataaaacagttaaggggataccaatatataaaaattattaggtaagctcatttctggaactgttaatgctcggtttcacaatccaagnngaccaacagccttcactcagntactggnagtgntactatggttactacngntactacctttagtgtnaaaaact

SEQ ID NO: 534 - DNA, 334 bp, Homo sapiens
  misc_feature 43, 44, 96, 126, 219, 228, 239, 248, 263, 287, 299, 310,318, 322, 323, 330: n = A,T,C or G
ccgccagtgtgatggatatctgcagaattcgcccttagcgagnnagccgggcaggtccatggctaggtttatagatagttgggtggttggtggggnatgagtgaggcaggagtccgaggaggttantttgtggcaataaaaatgattaaggatactagtataagagatcaggttcgtcctttagtgttgcgtatggctatcatttgttttgagggtagnttgattagncattgttgggnggtaattantcggctgttgatganatatttggaggtggggatcaatanagggggaaatanaatgatcagtnctgcggcnggtnngacctcngccc

SEQ ID NO: 535 - DNA, 557 bp, Homo sapiens
  misc_feature 1, 536, 538: n = A,T,C or G
nccataagcttcagtgcgcaaaaggtcaaggccagtgttaatttgttatttcttaaataactttccctttcatttttaaattataaatttaacttctaacatgttttatggttaaaattgtacttttttcctttagcgacattcaaatgcatcacaatcactttgtgaaattgttcgcctgagcagagaccagatgttacaaattcagaacagtacagagcccgaccccctgcttgccactctagaaaagtatgtgtaaaactctgttcttgttcttctttcatattgatgctgttccatgtgttaccattgtgagtggttggtaagtgttccttatgtgggaatcatgtgccttgaaaataaccttgggtgggtgagaaggtagggaaacctgcttcttttatctcaagtaaaagttttggcagggtaaagaagataaatgacatttatatctagacttttgagttttccaattatttggtaaaaatgggaaattctgtagaagcccttccttaaaaatgggggaagtccatttnanaaaattaactggtaggtca

SEQ ID NO: 536 - DNA, 372 bp, Homo sapiens
  misc_feature 37: n = A,T,C or G
gttccaaccttcatttctgaaactgttctagagcacngtgtctttctcgtagttcataacttaccccttcagtctagaattagaattacattatctgttttactactttactagactgtaagctcctagaagataaggactagggagttcatctctgtattccaccagaaggtacagtgactcatatctagagtctttagatgaaacttactgagttgaataacttaatatatttctgttttcattcccaagggaggccatgtctggagatagaccttgaatttaataaattttaggcactataccatttcagtggagaaaattgttgggaaatttggggggatggatatataagggggaggaagtcactgg

SEQ ID NO: 537 - DNA, 284 bp, Homo sapiens
  misc_feature 37: n = A,T,C or G
ccttctgatgcaaacagaaaggaaatgttgtttggangccttgctagacctggacatcctatgggaaaatttttttggggaaatgctgagacgctcaagcatgagccaagaaagaataatattgatacacatgctagattgagagaattctggatgcgttactactcttctcattacatgactttagtggttcaatccaaagaaacactggatactttggaaaagtgggtgactgaaatcttctctcagataccaaacaatgggttacccagaccaaactttgg

SEQ ID NO: 538 - DNA, 293 bp, Homo sapiens
gtacatagtaggtgtatatatttatgggctatataagatgttttgatacaggcatgtaatgtgaaacaagcacatcaacaagaatggggtatccatcccctaaaacatttgtcctttgggctacatgtcatttcctaatgtaaagaaaatggacagacagaaccaacattgatttgactgggtgaaaaagtccatttgagttgggagcaggggttgtgttcctggatttgggttgttaggacagtgtaaaaaggcttcacaggggaacattcttttctgataaaggaaagcag

SEQ ID NO: 539 - DNA, 468 bp, Homo sapiens
  misc_feature 5, 35, 36, 59, 251, 367, 436, 437: n = A,T,C or G
tttcnataaactttatttttagagcagttttaagnnggtagcaaaattgattagaaggnacagagatgtcccatacacctcctactcccacacatgcacagccttccccattatcaatagcccccaacagagggatacatttgttaacaactgacgaacctacatatcattatcacccaaagtccacagtttatattattccttctggagaattttcaaatacagaaattcctctaccaggaataaactancaatttcctctcggctttctataaatttaattattatttcagaaattagcctatctttacaggagaaaatgttataaaccatgaaaagactatcaaatacacaaggaagtgaatgntatataaaaaatgtaccatctcctaaacaactacctgcattcccttcttgttggtaagttataatttgnnatagttctgatcatctgtttaattaatttgc

SEQ ID NO: 540 - DNA, 397 bp, Homo sapiens
  misc_feature 35, 360: n = A,T,C or G
ctgttttattaattcccccatttgcagcacacttntctcttccaacattcatcagtcagatcagagtccacggtcttttcaaaatttagataaactggcttacattttgtaatgatgtccccagacaacaccccactccaacccattctgtttgttactattagtttacaacatgcatgtgcctttactttcattttcatagtatttaaaaatggaagggcactcccaaatttactttaacccctttaataatctctctcctcctgctctctctggtcctccagacaactgttgatttactttcctttatgatggattagtttgcattttctagaattttatatgactgacatataaagnttttatgtttctcccctttgggtttcttcatgtggca

SEQ ID NO: 541 - DNA, 248 bp, Homo sapiens
cctagataggggattgtgcggtgtgtgatgctagggtagaatccgagtatgttggagaaataaaatgtgcatagtgggggttttattttaagtttgttggttaggtagttgaggtctagggctgttagaagtcctaggaaagtgacagcgagggctgtgagttttaggtggagggggattgttgtttggaagggggatgcgggggaaatgttgttagcaatgagaaatcctgcgaataggcttccggc

SEQ ID NO: 542 - DNA, 366 bp, Homo sapiens
  misc_feature 75, 123, 364: n = A,T,C or G
aatcggccctctagatgcatgctcgagcggccgccagtgtgatggatatctgcagaattcgcccttgagcgatancgcgggcaggtccaattgatttgatggtaagggagggatcgttgaccncgtctgttatgtaaaggatgcgtagggatgggagggcgatgaggactaggatgatggcgggcaggatagttcagacggtttctatttcctgagcgtctgagatgttagtattagttagttttgttgtgagtgttaggaaaagggcatacaggactaggaagcagataaggaaaatgactatgagggcgtgatcatgaaaggtgataagctcttctatgataggggaagtagcgtcttgtanac

SEQ ID NO: 543 - DNA, 460 bp, Homo sapiens
cctactatgggtgttaaattttttactctctctacaaggttttttcctagtgtccaaagagctgttcctctttggactaacagttaaatttacaaggggatttagagggttctgtgggcaaatttaaagttgaactaagattctatcttgggcaaccagctatcaccaggctcggtaggtttgtcgcctctacctataaatcttcccactattttgctacatagacgggtgtgctcttttagctgttcttaggtagctcgtctggtttcgggggtcttagctttggctctccttgcaaagttatttctagttaattcattatgcagaaggtataggggttagtccttgctatattatgcttggttataatttttcatctttcccttgcggtactatatctattgcgccaggtttcaatttctatcgcctatactttatttgggtaaatggtttggctaag

SEQ ID NO: 544 - DNA, 116 bp, Homo sapiens
  misc_feature 42, 46, 95: n = A,T,C or G
ccgccagtgtgatggatatctgcagaattcgccctttggagngctngcgcccgggcaggtctgtttcagcagctcctccttcttcttcccgcgangatctcgagccttgatcttgg

SEQ ID NO: 545 - DNA, 380 bp, Homo sapiens
  misc_feature 13, 18, 102, 104, 123: n = A,T,C or G
cgacggatcgatnagctngatatcgaattcggacgagcatggcgtattgctgcagatatggattcttcagaatgctccatgacaaatgtactgacgggaagncnatctaaaggaggcattgtnatgagagaaaggtctcgagctccagataaagagagatacagagttcttggaattggagttgcagaaacagtaagacaatcgattgtggggaagcgttcttttagagaatctttggccttcactccaaagcgttgttcttcatcaataataagtagctcgtgccgaattcctgcagcccgggggatccactagttctagagcggccgccaccgcggaggagctccagcttttgttccctttagtgagggttaatttcg

SEQ ID NO: 546 - DNA, 418 bp, Homo sapiens
ccagggcaattaggcaggagaaggaaataaagggtattcaattaggaaaagaggaagtcaaattgtccctgtttgcggatgacatgattgtatatctagaaaaccccattgtctcagcccaaaatctccttaagctgataagcaacttcagcaaagtttcaggatacaaaatcaatgtacaaaaatcacaagcattcttatacaccaataacagaccaacagagagccaaattatgagtgaactcccattcacaattgcttcagagaataaaatacctgggaatccaacttacaagggatgtgaaggacctcttcaaggagaactacaaaccactgctcaaggaaataaaagaggatacaaacaaatggaagaacattccatgctcatgggtaggaagaatcaatatcatgaaaatgg

SEQ ID NO: 547 - DNA, 172 bp, Homo sapiens
cctgaggttgggagaaattttgtccatttctttagaaccaaaattggcaaccagagagtatttggatgttacacaaaatatctagtttccctttctagcctaaattgggttgtttatagcacccgtctctccatttgagaaaaatggttaggatgctggtgcagggatgagg

SEQ ID NO: 548 - DNA, 367 bp, Homo sapiens
  misc_feature 340: n = A,T,C or G
ggtctgacttaagagaaacaatggaaggcaagaggcagtagaataatatattcaaaagatgcaaaggaaaaaaacctctcagccacgaattccttatccagcaattatttttcaaaaatgaaaataacacaaagacttagccagataaacagaaacattaactgaagttgttgctggcagacctaccatataaaaataaaaaactctaaaaaaattcctatggctaaaagcaagttacagaagacagtcacttgaatccacattttaaaaaaagcactgatatacgtaatattgacattataaaagacagtaaaaatgcatttcttctttataataaatngcttattaaataacatgtgtataatgg

SEQ ID NO: 549 - DNA, 418 bp, Homo sapiens
ccaaatcagaacctagagtgagcattctataaactcacctttgctttgatccttgaagatcacaagttttgatactgttgaaatctctactctttcaacactttaattaaatggcatttagaatttcatatacttctgttgttgtttccacaatcttaaactggatttagaaatacttataatgtaaatgcaagagctttaacttagtaaccgtatttcctattttttgttgtttttcttttgccagaatttctgtttgtctacaataaagtccagcgaaatacagtatttggttaggttacttgttaacataaaattttatcatttgtagagtttttacttaaccttcctattctctagtctctataatctttcaatgaagataaccagttacgaatatctcctataccatattagg

SEQ ID NO: 550 - DNA, 234 bp, Homo sapiens
  misc_feature 15: n = A,T,C or G
cctacccgccgcagnactgatcattctatttccccctctattgatccccacctccaaatatctcatcaacaaccgactaattaccacccaacactcacaacaaaactaactaatactaacatctcagacgctcaggaaatagaaaccgtctgaactatcctgcccgccatcatcctagtcctcatcgccctcccatccctacgcatcctttacataacagacgaggtcaacgat

SEQ ID NO: 551 - DNA, 542 bp, Homo sapiens
  misc_feature 13, 14, 29, 160, 190: n = A,T,C or G
cacccctaccccnntcctcataaaagttnctctccctggatcctctttttccctcatgagtgcccggttgcccaagtcaaaaacctgggagtgatataaactccccacacatccagtcagtcactcatcaactctattgattctgtctgctaaatatatntcaattgtattaacttaaacatatgcatanggcactttcttcttcactgcatttttgtgggctgcacttacctttcaggtaacgacaacactggcccctcttgcccttctagtcagaagtgccaaaatgatgagagctagccatgacaaacccacagccaacattacactgaatgtgcaaaactggaagggcatccaaacagaggaggggagagaggaatagacaggaagtcaaactgtctctgtttacagatgacatgtttctatatctataaagccccatagtcttggccccaaagcttcttctgctgataaactttagcaaagtcttagcatacaaaatcaatgtgcaaaaattactaacagtcctatacatcaagtca

SEQ ID NO: 552 - DNA, 411 bp, Homo sapiens
  misc_feature 6, 25, 209: n = A,T,C or G
cctggntgacaaggaggtgcctgtnatgtgaagatttgaggaaagagcattccaggcagggggaaggcttgatgcaaagggtctactgcaggcattagctgagcttatttaaagatcagaatgaaggccattgtggctagaacagagtggacaggaaggaatggtaccaggcaaagctgaagaagttggcaggattgagctctcataantcatggcaaagagttcccatttcattgtttgacggaaataaattggaaggtcttaagtaggagaagatttgattagatttacattttacgaagaagcactctggatgttatgtgaagaaatggcctttgcagggcaagggtggaaacaaagagatcagttaggaaattattggagtagctgaggattggatgaggggatgtg

SEQ ID NO: 553 - DNA, 631 bp, Homo sapiens
  misc_feature 395, 574: n = A,T,C or G
ccgggattagaactaaaacaagtgagatcacccctctaattatttctgaacttggttaataaaagtttataagatttttatgaagcagccactgtatgatattttaagcaaatatgttatttaaaatattgatccttcccttggaccaccttcatgttagttgggtattataaataagagatacaaccatgaatatattatgtttatacaaaatcaatctgaacacaattcataaagatttctcttttataccttcctcactggccccctccacctgcccatagtcaccaaattctgttttaaatcaatgacctaagatcaacaatgaagtattttataaatgtatttatgctgctagactgtgggtcaaatgtttccattttcaaattatttanaattcttatgagtttaaaatttgtaaatttctaaatccaatcatgtaaaatgaaactgttgctccattggagtagtctcccacctaaatatcaagatggctatatgctaaaaagagaaaatatggtcaagtctaaaatggctaattgtcctatgatgctattatcatagactaacgacntttatcttcaaaacaccaaattgtctttagaaaaattaatgtgattacaggtagagg

SEQ ID NO: 554 - DNA, 558 bp, Homo sapiens
  misc_feature 6: n = A,T,C or G
ccaggntagtctccaactcctgaccttagctgatccacccacctcggcctcccaaagtgctgggattacaggcatgagccactgcgcccggccaaacttgatatgcatttttaaataagttaatacattattcatggtttagtctcattatatattctatggtccactttgaaatttcatctaaccaaaatcatcttcatcctgcaatttgaggtttggacacaatggggattgatcagtaatttcttcatatgccctttctcaaggaaatagtttcctatgaaaaaaaagtcctatgttttcatgtaagttctctttttggagaagaaaaggagacattcttacttagcactctcagttttacaaaacgctgccaaccttaaaatttgtctattgattcccaaggcacacaaccaatagtctgtcaataacccggaataacatttctttaaggccccagtaactttcacatgtttgggttccaatcctcacctagaatcttgttaagaaaagtaaaccattcactcctctagaaactctaaggttgcttcttagggg

SEQ ID NO: 555 - DNA, 212 bp, Homo sapiens
ccaggtatttgcataatggcttttcttctgttgcctttgttcctttgtggccccagctaattgcctgagagtgccactgttagttttcaactctttctgatagaaaccctgtgtactaacatggaaatcttaggtaatctgctttttcaaagcacaatgcagaatttattggcggtggtgtaactttaagaatatccgagaagccaccaagg

SEQ ID NO: 556 - DNA, 219 bp, Homo sapiens
  misc_feature 214, 216: n = A,T,C or G
ccatgtgtctatctggagagaaggggaaacagcaagtgcaaaggccctgagatggaacatatctggagaattcgaagaatggtaagaaggccagagtggagcagaacaagtgtgggagagagttgtaggagatgagatcaaaggctaggaatgaagtgtaaggccatgtcatgtgaccttgtatgtccttgtaaggcttttttttttttttttnancct

SEQ ID NO: 557 - DNA, 482 bp, Homo sapiens
cctactatgggtgttaaattttttactctctctacaaggttttttcctagtgtccaaagagctgttcctctttggactaacagttaaatttacaaggggatttagagggttctgtgggcaaatttaaagttgaactaagattctatcttggacaaccagctatcaccaggctcggtaggtttgtcgcctctacctataaatcttcccactattttgctacatagacgggtgtgctcttttagctgttcttaggtagctcgtctggtttcgggggtcttagctttggctctccttgcaaagttatttctagttaattcattatgcagaaggtataggggttagtccttgctatattatgcttggttataatttttcatctttcccttgcggtactatatctattgcgccaggtttcaatttccatcgcctatactttatttgggtaaatggtttggctaaggttgtctggtagtaaggtggag

SEQ ID NO: 558 - DNA, 679 bp, Homo sapiens
  misc_feature 5: n = A,T,C or G
ctgtnaaaattctgaacctatccccaaaagaaaaaccgtgaaatacaagttttaggaggtggagcaaagaaaagccaagttatttaaaaccaataaacacaagagacaattctgctggagaatttactttctccaaaacatcaaatggactttaaagcagaagaccacattttatgagaaagttatgtcactgaaaagcttcatgtaaagtgactttgtaaatggaatatttttaaatgataaaaagaaaataacttttccaggaatcctttggagaggctgataaccagatattaaattatcaattttgccaaagtggacttttaaaaaatgtgttacttttaaaaactaacttgaaagaatttatgaggcaatctatctgagtatgtttattgttgctccattggctttcaggattttggtcatttcactgttaactcttacatcagagaataaagaaaagaaaatgaaactttgttaggaactgggatggaaaatgtagtcccagacagatctactgacctcgactgagtttcagaaatatcccaggattttggttattcatgcctttcttttgtgactttctttcaaattagccaattaaagataccccttcaatcaccggtgacatcagtacaacagtttttcaacagttttctctctcctgaccaaacagttt

SEQ ID NO: 559 - DNA, 488 bp, Homo sapiens
  misc_feature 393, 407, 420, 450: n = A,T,C or G
ccccactgtactccagcctgggtgaccccatctcaaagaagaaaagttaccagatgtcatgggtaaaggttggtcttcaagtggcctcataagttgtcttgcatttaaattcagggaattcattggaccaataggttacattttcgttccttttttgttttggttcatctgttaagcagtgggggcctaattactgctcctttgtaaaaacacattttcccaaagaacactgaattaccgttcaaactggttgttgatgggtaacaagggctgtttttgctgccccaaaagggcttaacaatttaggcggatagtttacttaaaaaaaaaaatcctttggagacatactgaaaatgcaaactagtttctaaattatcaattccctacatgaanaagcagtttgccanagtttagtctcanaaaatgactggttggctctatttaaatcanaacccaatttctacgcacctgcccgcccggccaagggc

SEQ ID NO: 560 - DNA, 602 bp, Homo sapiens
  misc_feature 5, 566: n = A,T,C or G
cctanttaagaattccttgccttagtggtgaacaaggactaaacacagacaatgggtgaaacacagacgctaattcacataacagagagtaggcaaccttaagaatgaattgatgcagactcctatagaattcctctgttatgactgggttcttattttctcctccttgtatgtagttgaaatttcatcattatgaatagttccttggatctttttttaaagttgtgaatgcgagtgtttggctttgtaatacaactttttagtatccagaagataaccagtgctctaccaataaagatcttttgatacaaagggttttaacttctgccagttcttactcatttttttcaggttttttatacatttcttaaacaacacatacattatgtaaaatataagaattaatgtacattctcaaggccagattcagtgacaaaatgcactacccgaatctagtaacacatttactccttgctgcatataagtggcgtgtaagaaatacagggtatattgttttgtgatccatgcagtaaatgttcacaaatatcaggcaaacaactagacgntcttcagctactaaaattaactgtcccagtcacaaa

SEQ ID NO: 561 - DNA, 683 bp, Homo sapiens
gtctatttttaaaaagaaagaaaaaaaccacttttttatagtccctagctttgccatatgcccgccttaagtggaaggaaagttaatcacttaactatgttttataaaaagaaaaaagggcttggaatgctattactgttcacacaaagtatgattctgtttgaataaggcaaatgctcctttttttaaaaaaagacattactgtaatatcaaaaaccgtggcagtttgtatacaactctgggcttgattttttttaaaaaaacagaatgaattgatgtcttattttataaatgttctatatttattaggagaaaactttatattgccttttttatcaatcatgtaacaggcttatagctttccaacagagctgcttgccaaacaattttttttgtttattaaacagtgctgaaacaaacaggatcagcatttacttaagatgttaagaatgaggacttttaatcagccgaaccaagatattgttacctgtatgcattcccaaagtctagatgctcagtatgttcagtcatatctttcagaatcagtgaaccgattaccctttttttggtattcactctacatctgccaacctagttcaccttggttttgtgtctgctgtagaagggaaccataacttggttaaaccgtagggattatcattgtatacatgctgtgaacatgt

SEQ ID NO: 562 - DNA, 420 bp, Homo sapiens
gcactttttttccagtaaggattcatctcttgctctcctatatggtcattatattttatattttacatatttataaacatgacatatgtatttatgttccacaaagggctttgaatagaatttacacatagagttccctgggttgatgtgtttatcaaaatggaagataaagtgaattaattacttaaatatttaacactattgaatagaaataatttccccaatattgcttcatgatttagacagtctattaaatgtttaagcaaggcactagactaagtttattaagacaaattttggaatatgtgcagaaatatgacctggctaatagtacagagtcaaagctggttgaatggtgttatatagtggattcagattgatgtggcagtggtggttacactaggggcactaaggttatcc

SEQ ID NO: 563 - DNA, 482 bp, Homo sapiens
ctccaccttactaccagacaaccttagccaaaccatttacccaaataaagtataggcgatagaaattgaaacctggcgcaatagatatagtaccgcaagggaaagatgaaaaattataaccaagcataatatagcaaggactaacccctataccttctgcataatgaattaactagaaataactttgcaaggagagccaaagctaagacccccgaaaccagacgagctacctaagaacagctaaaagagcacacccgtctatgtagcaaaatagtgggaagatttataggtagaggcgacaaacctaccgggcctggtgatagctggttgtccaagatagaatcttagttcaactttaactttgcccacagaaccctctaaatccccttgtaaatttaactgttagtccaaagaggaacagctctttggacactaggaaaaaaccttgtagagagagtaaaaaatttaacacccatagtagg

SEQ ID NO: 564 - DNA, 302 bp, Homo sapiens
ctggaagtgaaggtactaatatacaaatggctcttgtttctgaatatgtgatataatttgtgaatctttggaaactgaattttttctatggagtgcaaatatagaagggttattttacaatgtttgttgtgaaaagaattcactttgtaaacaactattaaggctggaagtttagtgaaggtgcatagttttgaaagctacacaggtgaaaaatcaaacttattgtttgtaattttgctgttacatgttaagttactttgacagcaattttctaatgataatgtgatttatgatttaaaagg

SEQ ID NO: 565 - DNA, 554 bp, Homo sapiens
  misc_feature 4, 5, 37, 38, 550, 551: n = A,T,C or G
ccanngtgacatcatggcaatacagcaagaattctgnnatttatttagaagcctcaaggagaaggatcctggagcccctgaatgagagtttcttctccatgcctctccccagtcaaaatacatggaaatattcatagaagcattgtacccagcatgataaggaaggatggagaatggttccttatatctctgttcacaagacatcaacactcttaagtaactgtatgaaataaattctctgctgaaagcaaataaaccatctgaaaggtcttctggttacttacacagatttcctagagaatctgaaatcagcctaacagggaagattaatttttaaatgaatccaagttaatgaaagcaaagaactcttatacagaaatacattttcctattataaagcaggactaccttccctaatttctgatagacctaggacaatttgaatgggcattgaaattcttttggttgaattacgcaaacaagcaaaggaaaagtctcaattattattggaaaatttggggagagattattatctcttgatctcctagtnnatt

SEQ ID NO: 566 - DNA, 631 bp, Homo sapiens
  misc_feature 1, 14, 15, 35: n = A,T,C or G
ncgaagctgtgaanncattcacacggaatctgganggtattactgtaacttcttataatacataatataaaagtttttgaaagatatagacacaattaacccctaaacaacacactatctgattctcaaaagcaatggctatttaacaagatgtaaaaggacaataacatatcaaagaactttcacacacctaaagatagcatttagcagcaagttagtcagacaaaacaaacataaatatcttcacatttcctatgtttgtttttaactttacttcataaagccactgataattgaggtttctttcaagtataagatttctaaaattaaaaactgtttttgacatatttttataaagaaataaaaagcaaaacgcaatccaactatttatatgagtccctcttctccaacagctttagatgtttttctgagtactttttacacagaatatttttattaaaatcagttctaattcatttatgcagattaggggaaaatgattcataataaattaactttaaaattaccttctatctgcttctacctctatccccccatcaccaccaaatctgttgctacagtgaactgtagccaatgtctgtttgagggggcccaaagcatctggtaatct

SEQ ID NO: 567 - DNA, 510 bp, Homo sapiens
  misc_feature 6, 39, 87, 97, 111, 113, 161, 163, 179, 210: n = A,T,C or G
cctatnatagcttctctagctatcatactccaatcagcnaaaaatgagaaaatgttgagaaatagaagataattcctcatttaaggncaccttctanaatttgtgcttaanantctgttttcttctcatgggccagcacttcggcaactgggaaaaattangngtacagggatctaggnaatactgtttatttgagcaataatatattgngctaacgttcaggcatcctattactgagaaataagggaaaatgagtgtaaagtacaactaagagtctcggctacagggaaaaataccatcagttaaatatccatagtcctagagcatttatgtaaaactgcaatttgaatcctgcaatacattttggctttttcctcagtgataccatgtgtgggaagttgttctgtcaaggtgggtcggataatttgccctggaaaggacggatagtgactttcctgacatgtaaaacatttgatcctgaagacacaagtcaagaaataggcatggtgg

SEQ ID NO: 568 - DNA, 180 bp, Homo sapiens
  misc_feature 6, 11, 34: n = A,T,C or G
ttaatntgacncacgcttatgcggaggagaatgntttcatgttacttatactaacattagttcttctatagggtgatagattggtccaattgggtgtgaggagttcagttatatgtttgggattttttaggtagtgggtgttgagcttgaacgctttcttaattggtggctgcttttagg

SEQ ID NO: 569 - DNA, 237 bp, Homo sapiens
ccaattgatttgatggtaagggagggatcgttgacctcgtctgttatgtaaaggatgcgtagggatgggagggcgatgaggactaggatgatggcgggcaggatagttcagacggtttctatttcctgagcgtctgagatgttagtattagttagttttgttgtgagtgtcaggaaaagggcatacaggactaggaagcagataaggaaaatgactatgagggcgtgatcatgaaag

SEQ ID NO: 570 - DNA, 352 bp, Homo sapiens
ctgtctctccatttagagccccagttggtcctgacctcttacaaatttggtgttttcactttgatgtttatgaaccgattgcattaaaaatgcaggataatgattcagggttagagaaactattatttatacaaatgtggttaacacctcatcattttaaattggctgtgctaataatgctcattgtgctcttcagggttatgtgtgtgtgtgtgtgtgtgttttgcctgaatctgcaacctacatttgctctggcagtatgttgagtatatgctagaatagaatggacctaggcaactctaaggtcctacaactaaatacacttacttaggaaacctcctaaataagtagg

SEQ ID NO: 571 - DNA, 402 bp, Homo sapiens
ctgattttaacaataactactgtgttcctggcaatagtgtgttctgattagaaatgaccaatattatactaagaaaagatacgactttattttctggtagatagaaataaatagctatatccatgtactgtagtttttcttcaacatcaatgttcattgtaatgttactgatcatgcattgttgaggtggtctgaatgttctgacattaacagttttccatgaaaacgttttattgtgtttttaatttatttattaagatggattctcagatatttatatttttattttatttgtttctaccttgaggtcttttgacatgtggaaagtgaatttgaatgaaaaatttaagcattgtttgcttattgttccaagacattgtcaataaaagcatttaagttgaa

SEQ ID NO: 572 - DNA, 70 bp, Homo sapiens
  misc_feature 57: n = A,T,C or G
tggatccgagctcggtaccaagcttggcgtaatcatggtcatagctgtttcctgtgntcgttttacaacg

SEQ ID NO: 573 - DNA, 423 bp, Homo sapiens
ccaatggtttcttagtgaaagagtacactagctctgaatgcaatgccctcagaaagatatcattcatagagacatacaaagcacatggcaacatgacattggaatacacgattctgagcatcttcattcatgaccaacctggctatagatttcagatgtcctcttggctcgaaggatatctgggatatccatgctcacttgcattcctttccctttaatttcattttctaagtccttcttgtattgtttctaaaagaacagaaaataatcttggagctttgcttaagctttaatagcgatgttgaaatttacatgtttgaatctcaaagccacccatgtggaaagaaaacttatgctctttccagctatgattcacggcatttattttaaactttgtatcttgctgctgtcttacctggctgg

SEQ ID NO: 574 - DNA, 129 bp, Homo sapiens
ctgttaaaagaacaaacttagcaatatataacagtttgctaacaggatttttgactattcactttgcgagttatttttaaaaatccacttttttactgagtcttactacataccaggcactgtacttgg

SEQ ID NO: 575 - DNA, 684 bp, Homo sapiens
  misc_feature 7, 40: n = A,T,C or G
ccagatntgacttttcaaaactactcacattgtgaaaaangcaggaacaaatctagtttcaagttcagcatgccgttccctgtttaattcataaaacacaactggcagaagtattacttgaagcaaaacaaaagtaacgtgggaacttgcttatttgctaagccacaatgtatttttccaggaatagcataaatttgccatctttcttgtgtctatggaaaaggggtttagaattgtttcactaaaaattaaatttctatattgtcaaacatgattgtatactcaaattttaaaatgtgaagggaacacttactaagcatttcctgggtatgccactatattaagtcctagtaatatgatatagtttatttcaattttttttcaactcatacttcctttaaaatagcactgaccaaaagaaagttaacatgagcttcatgtacaatttttaatctttttgcagaaaaataaactgagaaaggctaaaattgttttatttaagccactataccaagacatattgatttcaccaatataaaaattgagatagtttacattttttggtacatctttaaaatctggtatgtatttttatactgacagcacatctcaatttggacaagctacatttccagggctcaatagtcaccatgaatctcaattgtaatcaaagaggttggcctg

SEQ ID NO: 576 - DNA, 134 bp, Homo sapiens
ccttatttctcttgtcctttcgtacagggaggaatttgaagtagatagaaaccgacctggattactccggtctgaactcagatcacgtaggactttaatcgttgaacaaacgaacctttaatagcggctgcacc

SEQ ID NO: 577 - DNA, 133 bp, Homo sapiens
  misc_feature 14, 25, 27, 34, 117: n = A,T,C or G
ctgtctctccattnagaagccccantnggtcctnacctcttacaaatttggtgttttcactttgatgtttatgaaccgattgcattaaaaatgcaggataatgattcagggttaganaaactattatttatac

SEQ ID NO: 578 - DNA, 200 bp, Homo sapiens
cctcaaatctatcttcaaaggtgacccagcaatcagtgtcaatgcctttactgtagttaacctggtaatttcattctttagtctctccaagaaaatctgaagtgtattaggcaagtcagaacccaaattgtctccaaggttgcaaataatttgtcccatacaggaaatagccctttccttgacttcctgatcaatgtcag

SEQ ID NO: 579 - DNA, 402 bp, Homo sapiens; identical to SEQ ID NO: 571

SEQ ID NO: 580 - DNA, 245 bp, Homo sapiens
  misc_feature 80, 114, 217, 233, 237: n = A,T,C or G
ccaattgatttgatggtaagggagggatcgttgacctcgtctgttatgtaaaggatgcgtagggatgggagggcgatgangactaagatgatggcgggcaggatagttcagacngtttctatttcctgagcgtctgagatgttagtattagttagttttgttgtgagtgttaggaaaagggcatacaggactaggaagcagataaagaaaatgactnttagggcgtgatcatnaaangggataaa

SEQ ID NO: 581 - DNA, 294 bp, Homo sapiens
tgcagcgcaagtaggtctacaagacgctacttcccctatcatagaagagcttatcacctttcatgatcacgccctcatagtcattttccttatctgcttcctagtcctgtatgcccttttcctaacactcacaacaaaactaactaatactaacatctcagacgctcaggaaatagaaaccgtctgaactatcctgcccgccatcatcctagtcctcatcgccctcccatccctacgcatcctttacataacagacgaggtcaacgatccctcccttaccatcaaatcaattgg

SEQ ID NO: 582 - DNA, 230 bp, Homo sapiens
gaggtcgccctcatagtcattttccttatctgcttcctagtcctgtatgcccttttcctaacactcacaacaaaactaactaatactaacatctcagacgctcaggaaatagaaaccgtctgaactatcctgcccgccatcatcctagtcctcatcgccctcccatccctacgcatcctttacataacagacgaggtcaacgatccctcccttaccatcaaatcaattgg

SEQ ID NO: 583 - DNA, 481 bp, Homo sapiens
ccaagggtgttctgcctgcctcagcctcccaaagtgctgggattacaggtgtgagccactgtgcctgaccacaggaaaacttatttaaatgagagatttgactcgaaagatcccgtttttttaaggctcttagttcttaaaagcggcacataatagaattagtataatcccaaataaattttcagtagatttttggtgtaacttgagaagatgattctgtcatttttagtgacaatttaaaagacctgaaattgtctacagccatagaaagtgaactactgatagttgtttctgtaaagttttattggaacacaaccacacctatttgttcatctgtattgtctttggttactttgtgcagagaccatggcccacaaacctaaaacattcactttctagctctttaagaaataattggcccactgacaccctggtcttaaggtctagaccaattatttctcaagagtattagctgaatcag

SEQ ID NO: 584 - DNA, 306 bp, Homo sapiens
ccaattaagagctaaatttacaaaataatctctatcaggaggctttaaggtttaatgtctctaaagtccctatggatataagaggcttgaatgtactgaattcaaatttggtttttaaatgttataatagtttaggcccgagagccacatatttctgtctaagaatagaaagcatagctagctgcccacacagaatattcatatagaggtggggggcaagaacaaaatttattcatttgatacatagaaatgggactacttagaatagactcataatagaaagcatcatctggtttctcatctcag

SEQ ID NO: 585 - DNA, 308 bp, Homo sapiens
ccagaatggtacagagtggagggtgttctgctaatgacttcagagaagtatttaagaaaaacatagaaaaacgtgtgcggagtttgccagaaatagatggcttgagcaaagagacggtgttgagctcatggatagccaaatatgatgccatttacagaggtgaagaggacttgtgcaaacagccaaatagaatggccctaagtgcagtgtctgaacttattctgagcaaggaacaactctatgaaatgtttcagcagattctgggtattaaaaaactagaacaccagctcctttataatgcatgtcag

SEQ ID NO: 586 - DNA, 416 bp, Homo sapiens
  misc_feature 105, 119, 132, 139, 140, 144, 159, 160, 208, 226, 230, 247,250: n = A,T,C or G
cctgtctttgaatggatgaaataggttaataaaaaacatcactgtttaaaaactagaacactgaaaaattctaggaaagcttattttcccttatatttttatggnactttcaacacttnacaacactatttnaattaanntttnttctagagtttatannatatcagtacattcttttctgtggatgcaataatatagaatcttattncaaatcttactggcaggntctnttaaattcttcaacggntgncatagtgattaaccaaaattagttatgatttctgcctatctgtgtgagaacttacaggggaaattgttctaaacctgaggaacatgaagtaactgtactgcacactccaaatgatgacagtcattttatatcaccttcaattacccaacagcttttaatagtctgg

SEQ ID NO: 587 - DNA, 382 bp, Homo sapiens
cctactatgggtgttaaattttttactctctctacaaggttttttcctagtgtccaaagagctgttcctctttggactaacagttaaatttacaaggggatttagagggttctgtgggcaaatttaaagttgaactaagattctatcttggacaaccagctatcaccaggctcggtaggtttgtcgcctctacctataaatcttcccactattttgctacatagacgggtgtgctcttttagctgttcttaggtagctcgtctggtttcgggggtcttagctttggctctccttgcaaagttatttctagttaattcattatgcagaaggtataggggttagtccttgctatattatgcttggttataatttttcatctttc

SEQ ID NO: 588 - DNA, 307 bp, Homo sapiens
cctactcttctccgtccattgtactatctgcccgtggtggggatggcagtaggatcatatttgatgacttccgagaagcatattattggcttcgtcataatactccagaggatgcgaaggtcatgtcctggtgggattatggctatcagattacagctatggcaaaccgaacaattttagtggacaataacacatggactaatacccatatttctcgagtagggcaggcaatggcgtccacagaggaaaaagcctatgagatcatgagggagctcgatgtcagctatgtgctggtcatttttggagg

SEQ ID NO: 589 - DNA, 89 bp, Homo sapiens
cctgggtgattgaggatgcaatgagctgtgattgtgccaccacactccagcctgggcaatacagcaagactgtctcaaaaaaaaaaaaa

SEQ ID NO: 590 - DNA, 456 bp, Homo sapiens
cctcagttcttgattgtggttgacggggcgtcaccatgaaggagcccatttagtataaagcttccaaccttttctcttaatcgtttctttaatcttttaaaccatcttcaagtgcataggggagtttccgatgccagaggatgaaagcaagtgctctctccaccctctcctcccagagtgaaaacaaatccttttgctgatacttgtttcaaaagcatccattgtaaagcttctcagtgacacaaaatactgagaggtaactttttatcaatcaaaccacataccccaatttaacacctttcaatgctctgaattcaactgacagactaaagggtgtttcctgtaacagtctgaaatattaagtgttttttttgttttgtttttaaatcttatttcagaaaacttcctcttggggtaggaaagtacacatgaagcagcaaagtaacgaagaaaaac

SEQ ID NO: 591 - DNA, 289 bp, Homo sapiens
ccaattgatttgatggtaagggagggatcgttgacctcgtctgttatgtaaaggatgcgtagggatgggagggcgatgaggactaggatgatggcgggcaggatagttcagacggtttctatttcctgagcgtctgagatgttagtattagttagttttgttgtgagtgttaggaaaagggcatacaggactaggaagcagataaggaaaatgactatgagggcgtgatcatgaaaggtgataagctcttctatgataggggaagtagcgtcttgtagacctacttgcg

SEQ ID NO: 592 - DNA, 435 bp, Homo sapiens
  misc_feature 250, 316, 325, 392, 430: n = A,T,C or G
cgcgttagatgcgccttttccggcctgtgcgtctgctctggttcctctcaggcagcaaagctggggaaggaagctcaggcaggagcctccccgacaccacagcggcacaagcagcagctaaagcaccgcactttgctctgctaaccttttacttaaatgaggttttgccaaatccacatctggaaccgcatcacacccatttgcaaggatgtttgttctttgatgaaactgcatctctactgcacatganggctttcattgtaggacaagaggagagttcgtttatttttgtaactgttttacatgttccgattanttaatcggnagcttatgtcatttgctatgcctgttgtcttctaatctctccttactaaaacattacttcaaatttnaattgacccttgtttataatttatttaacgggatttgngtgtc

SEQ ID NO: 593 - DNA, 633 bp, Homo sapiens
  misc_feature 35, 620: n = A,T,C or G
ctgtttagtcagataattgtgtccgaattgattangaaaataatagaccagccataaagcagcataaaatattatgaaactattccagaagttcagtaatatctttgggacctgctcatagcccaagttttgtgaatacttttgtagttaaaaaaaatttttactttaccagggcattgcaattcttttccatcagtgaatttcattctacagacttttcagagcatctcataatcagtcaacaaatctatttcaaatgtgtttgttactaagcaacggttgctaagagcttctgtaattaagatgaaagttccaaggtaacaatgcccaaacacagcaccattttcaccattttctgataatgcaggagtaggatggctaaaagtgaaagaagaatctactctatggaaagcatggcacctgaaatttctgaagatattggctgtcctctagcttatatgagagagagtgtttgtgctttactaatcaaccagtcatttttttcttgtgtggctgaaatgtacattccagacatgaacaggtagagtatgtgttgggggcaggtttatactgcatgggtgtgctgagacagggccacgtggtgatgtaaatgatgctgnctgacacgtgcag

SEQ ID NO: 594 - DNA, 501 bp, Homo sapiens
  misc_feature 34: n = A,T,C or G
cctttacaagatgctggtaccttgatcttggacngggcaggctccaagatggaaagaaagtgagcatctgctttttagggattatccagtctatactactctgttctagccacacaaaacaggttaagacagaaattggtaccaagagtggggtgttactacagcaaatacctgaaaatgtagaagaggctttgaaatgtggtaattggaagaagctggtagaatttggaggagtaggctagaaaatgtctgtattttcatgaatggagcattaagaataattccggtgaggccatagggaaagtctaaaacttttcagaaattatgtaagcgattgtgattagtaggttggtagaaatatagacagtaaaagcaattctgatgtggtttcagaggaaaatgaaaaatattagaaactgaaggaaggggcatccttgctataaactggcaaagaacttggctgaaatgtctccatgtccaagagatttatggcagaaatgt

SEQ ID NO: 595 - DNA, 383 bp, Homo sapiens
ctggtcaccatcatccctttaatcaactcacacctgtttaaagagtgtttctgatttgaccttcatcccttagtttactggcgttaaaaaaagtctcagcaattttcattatttctcgtgggtctcattatcaaacctttacttatttcggcatatttcctctgggcttcttctagtttctgccttacaagcaatgctgttctgtaaatttattgaaacctctggaacatttcacctttagagatggaggatggaaggattggtaccagaagagggctaagatacgttttctgtcttgagctgaaagcacagtctactctccttcgttttgtcgatgagaaagttgaggccagaggggaggtgacatgtttagagtcacccag

SEQ ID NO: 596 - DNA, 266 bp, Homo sapiens
ccatggctaggtttatagatagttgggtggttggggtaaatgagtgaggcaggagtccgaggaggttagttgtggcaataaaaatgattaaggatactagtataagagatcaggttcgtcctttagtgttgtgtatggctatcatttgttttgaggttagtttgattagtcattgttgggtggtaattagtcggttgttgatgagatatttggaggtggggatcaatagagggggaaatagaatgatcagtactgcggcgggtagg

SEQ ID NO: 597 - DNA, 383 bp, Homo sapiens
  misc_feature 35: n = A,T,C or G
ctggtcaccatcatccctttaatcaactcacaccngtttaaagagtgtttctgatttgaccttcatcccttagtttactggcgttaaaaaaagtctcagcaattttcattatttctcgtgggtctcattatcaaacctttacttatttcggcatatttcctctgggcttcttctagtttctgccttacaagcaatgctgttctgtaaatttattgaaacctctggaacatttcacctttagagatggaggatggaaggattggtaccagaagagggctaagatacgttttctgtcttgagctgaaagcacagtctactctccttcgttttgtcgatgagaaagttgaggccagaggggaggtgacatgtttagagtcacccag

SEQ ID NO: 598 - DNA, 266 bp, Homo sapiens
ccatggctaggtttatagatagttgggtggttggtgtaaatgagtgaggcaggagtccgaggaggttagttgtggcaataaaaatgattaaggatactagtataagagatcaggttcgtcctttagtgttgtgtatggctatcatttgttttgaggttagtttgattagtcattgttgggtggtaattagtcggttgttgatgagatatttggaggtggggatcaatagagggggaaatagaatgatcagtactgcggcgggtagg

SEQ ID NO: 599 - DNA, 294 bp, Homo sapiens
  misc_feature 201: n = A,T,C or G
ccaattgatttgatggtaagggagggatcgttgaccacgtctgttatgtaaaggatgcgtagggatgggagggcgatgaggactaggatgatggcgggcaggatagttcagacggtttctatttcctgagcgtctgagatgttagtattagttagttttgttgtgagtgttaggaaaagggcatacaggactaggaagcanataaggaaaatgactatgagggcgtgatcatgaaaggtgataagctcttctatgataggggaagtagcgtcttgtagacctacttgcgctgca

SEQ ID NO: 600 - DNA, 213 bp, Homo sapiens
agatattgggctgttaattgtcagttcagtgttttaatctgacgcaggcttatgcggaggagaatgttttcatgttacttatactaacattagttcttctatagggtgatagattggtccaattgggtgtgaggagttcagttatatgtttgggattttttaggtagtgggtgttgagcttgaacgctttcttaattggtggctgcctttagg

SEQ ID NO: 601 - DNA, 471 bp, Homo sapiens
  misc_feature 1: n = A,T,C or G
ncctactatgggtgttaaattttttactctctctacaaggttttttcctagtgtccaaagagctgttcctctttggactaacagttaaatttacaaggggatttagagggttctgtgggcaaatttaaagttgaactaagattctatcttggacaaccagctatcaccaggctcggtaggtttgtcgcctctacctataaatcttcccactattttgctacatagacgggtgtgctcttttagctgttcttaggtagctcgtctggtttcgggggtcttagctttggctctccttgcaaagttatttctagttaattcattatgcagaaggtataggggttagtccttgctatattatgcttggttataatttttcatctttcccttgcggtactatatctattgcgccaggtttcaatttctatcgcctatactttatttgggtaaatggtttggctaaggttgtctggt

SEQ ID NO: 602 - DNA, 482 bp, Homo sapiens
  misc_feature 32: n = A,T,C or G
tgagcatacagcaataaaaataacataatttntatgtgtacaatatttatggaatacgttactggaacagataaataatttagttaataacatgacaaagaacagaaattgtatacactatacagcatagtaatagaataatgaatgattaaagttattaatattaggtagaaaatgaagggtatctttgagagcagaactcaaggaagcaagcaatttgccttatgaggaaagagttacctgtggataaaggagaaactgaaaaatttacaagtcaagactttttgagcaaaaacaaaaatatgactatgagtcaccaattcagtacagtgaaaaaaaagttgaagagatatcttggaagtaaaccatgttgtggaagagcagggttttgataatcatgggattattctgaatgaattttaaatgcgataggaatatatgagataatttcaccagagaataatatgatcatgtttgcattt

SEQ ID NO: 603 - DNA, 372 bp, Homo sapiens
gttccaaccttcatttctgaaactgttctagagcactttgtctttctcgtagttcataacttaccccttcagtctagaattagaattacattatctgttttactactttactagactgtaagctcctagaagataaggactagggagttcatctctgtattccaccagaaggtacagtgactcataactagagtctttagatgaaacttactgagttgaataacttaatatatttctgttttcattcccaagggaggccatgtctggagatagaccttgaatttaataaattttaggcactataccatttcagtggagaaaattgttgggaaatttggggggatggatatataagggggaggaagtcactgg

SEQ ID NO: 604 - DNA, 468 bp, Homo sapiens
  misc_feature 3, 37, 199, 412, 460: n = A,T,C or G
gcngttttgagtgagtttcttaatcctgagttctggnttgattgcactgtggtctgagagatagtttgttataatttctgttcttttacacttactgaggagagctttacttccaagtatgtggtcgattttggaataggtgtggtgtcgtgctgaaaagaatgtatattctgttgatttggggtggagagttctgtanatgtctattaggtccgcttggtgcagagttgagttcaattcctggatagccttgttaactttctgtctcgttgatctgtctaatgttgacagtggggtggtaaagtctcccattattattgtgtgggagtctaagtctctttgtaggtcactaaggacttgctttatgaatctgggtgctcctgcattgggtgcacatatatttaggacagcnagctcttcttgttgaattgatccctttaccattatgtaatggccttgnctcttttg

SEQ ID NO: 605 - DNA, 288 bp, Homo sapiens
ccaattgatttgatggtaagggagggatcgttgacctcgtctgttatgtaaaggatgcgtagggatgggagggcgatgaggactaggatgatggcgggcaggatagttcagacggtttctatttcctgagcgtctgagatgttagtattagttagttttgttgtgagtgttaggaaaagggcatacaggactaggaagcagataaggaaaatgactatgagggcgtgatcatgaaaggtgataagctcttctatgataggggaagtagcgtcttgtagacctacttgc

SEQ ID NO: 606 - DNA, 572 bp, Homo sapiens
  misc_feature 5, 399, 483, 488, 532: n = A,T,C or G
gaatnaaatgaatgaaatagaaaatataattgagagcttcaacaacagactataccaaatggaggaaaaaatttctgaacttgaagatagatcttttgaaataacacaagcagtggcaaaaatgaattaaaaagaataaggaaagcctaaaggatttatgagatatcattaagcaagcaaatattcatactatgggcattccagatggaaaaaagaagggtaaaggtgaggaaatcatatttaatgaaataatagcagaaaatttccggagtcttgggagagagatgagcatttaggtccagggagctcaaagaaccccaaacagattcaacccaaacaggtcctctctggagcccaacatagtcaaattgtaataagtaaaagacaaagaattccaanaagcattcaagagaaaagagtcaagtcataaataagggaatctccattaggctaacagcagatatctcagcagaaagcttacangccangagagaatgggatgatatattcaaagtacttgaaagcaggggtnggggaaaccctgctagctaaaaatattatacccttgcaaa

SEQ ID NO: 607 - DNA, 178 bp, Homo sapiens
  misc_feature 37: n = A,T,C or G
ctcggggtaatctcccagcaagaggtcaggtcctggntgtgcgtcccagggtgtcagtgaaattggctgctcccctgacccagggcaccttcatgcgtcttcacagcaggactactgtgaccaaggccagacctttcatctttcaaaagactttgactaaaaatgctttaaaaaagca

SEQ ID NO: 608 - DNA, 416 bp, Homo sapiens
cctgtctttgaatggatgaaataggttaataaagaacatcactgtttaaaaactagaacactgaaaaattctaggaaagcttattttcccttatatttttatggtactttcaacacttaataacactatttcaattaagttttctcctagagtttatagtatatcagtacattcctttctgtggatgcaataatatagaatcttattccaaatcttactggcaggttctcttaaattcttcaacggctgtcatagtgattaaccaaaattagttatgatttctgcctatctgtgtgagaacttacaggggaaattgttctaaacctgaggaacatgaagtaactgtactgcacactccaaatgatgacagtcattttatatcaccttcaattacccaacagcttttaatagtctgg

SEQ ID NO: 609 - DNA, 648 bp, Homo sapiens
ctgatctctcagcagaaactcttcaaaccagaagagagtgggggccaatattcaacattcttaaagaaaataattttcaacccagaatttcatatccagccaaactaaccttcacaagtgaaggagaaataaaatcctttacagacaagcaaatgctgagagattttatcaccaccaggcctaccctaaaagagttcctgaaggaagcactaaacatggaaaggaacaaccagtaccatcgaggctaggaagaaaccgcatcaactaaggagcaaaataaccagctaacatcataatgacaggatcagattcacacataacgatattaactttaaatgtaaatggactaaatgctccaattaaaagacacagactggcaaattggataaagagtcaagacccatcagggtgctgtattcaggaaacccatctcaccgtgcagagacacacataggctcaaaataaagggctggaggaagatctaccaagcaaatggaaaacaaaaaaaggcaggggttgcaatcctagtctctgataaaacagactttaaaccaacaaagatcagaagagacaaagaaggccattacataatggtaaagggatcaattcaacaagaagagctaactatcctaaatatatattgcaccc

SEQ ID NO: 610 - DNA, 310 bp, Homo sapiens
ccagctcttctctgtcacattcctatttctgacttctgcctggctttcagtttctgccccaccttggctttttcccagcttgaacctaatagaactccagagtttggggggaggcccagccctttgttttctgctcttgaagcatattcacacataaaaagttgtattctcttacacaaactgttttgaggctcttaccgtagtcgaaggtatcttagatcttccttagtgatctcattaagaatatccgaaagtgtataaccctcttcaacaatctgaaacaaagatcagatccttaagagctgagcag

SEQ ID NO: 611 - DNA, 254 bp, Homo sapiens
  misc_feature 39: n = A,T,C or G
ctgtttttacatctaaagcaatagactagaactgaattntcttctacatagtaaaatcacaattgtggaattacaggaattctggtgatattaaggtgaaacaacaaaacacaaaaggccctattttaacagttgatgtgacagtaagttttaatagaacctgtaacttcattttggaaatgcttctccaccaaataaggcctttttcccctatttaaggagccagatggattgaaagatgtggaaataggcag

SEQ ID NO: 612 - DNA, 225 bp, Homo sapiens
  misc_feature 40: n = A,T,C or G
ctgactatatcatgtcaccatcatagccaatacaacattnttgccatacttcctaaaaaccttttcgcatacactgatcatgctacttatcagcactttctaacatcctgaccaaacagacacccacacctcttatagagtacactgtgagagaataacatggacttgatatggcatcacacttgttttaaagcaaaaaaaaaagaaaaagaaaagaaaaaaaaa

SEQ ID NO: 613 - DNA, 471 bp, Homo sapiens
  misc_feature 226, 236, 243, 281, 324, 365, 370, 373, 376, 383, 400, 412,429, 431, 458: n = A,T,C or G
ccatcagacttcttgggtgcctggctatattcaatgtgaagtaaaaaatatcccaagtcttacaccaaaatagaggctctgacttagaagtatgcttttagctttctttttaaataagacattctggaagaaaaaaaaagaaaaaggaaagaaaatcaagtttgaaacacagttaacacttattttggcaagaaagcaaccaaaatctaaaaagcataaactatgngtccaaatgnaaaaggnattacagaacaaactgcaagaggggaaaattaaagccncactgaacgaaaaaatacagtatgtctaacattttggaattgnaatttaaaccctaagggcaaaagctgaaaaatcatgcttanacctnggncgngaccacnctaagggcgaattccancacactggcggncgttactagtggatccnanctcggtaccaagcttggcgtaatcctnggcatagctgttt

SEQ ID NO: 614 - DNA, 421 bp, Homo sapiens
gttattttttagaatggctctcccatcttgagtatgtgtgatgtttcctcatgtatgaatgaagcatatacatctttgtcagaagtatcccagaagcaattctgtactctcctcattatgttctattgggtgggccatggtttttgatttgtctcattactgatgatggttacttttattatttgataaaggttgtatataacttatctattatggcataatacattagctaaaaccttggcggtgtaaaacagcagatacttacgtttctcataggaatggctctattgagtacctctgtctcaaggcttctcaagagtttgtagctaccttgttggctggggttgcggtctgacctaaaggcttagttagggggtggtagaaatcttccatatgttctttgctacgtggacctcacagg

SEQ ID NO: 615 - DNA, 242 bp, Homo sapiens
cctcctatttattctagccacctctagcctagccgtttactcaatcctctgatcaggatgagcatcaaactcaaactacgccctgatcggcgcactgcgagcagtagcccaaacaatctcatatgaagtcaccctagccatcattctactatcaacattactaataagtggctcctttaacctctccacccttatcacaacacaagaacacctctgattactcctgccatcatgacccttgg

SEQ ID NO: 616 - DNA, 392 bp, Homo sapiens
  misc_feature 79, 91, 105, 110, 128, 141, 149, 163, 172, 178, 193, 206,215, 264, 270, 276, 284, 297, 305, 315, 335, 342, 350, 351,359, 373, 392: n = A,T,C or G
cctaatttgtagattgtgaaagcagcttttagtttaacttatttacagaccccttataattaccatgtttttttttttnttcctaaatctnttggttcagcttgngaatnttacgtgcccgtaaagtngggatgttgaatnggcccttntttgttctggcagngagtcaagngtccancattttttcataagngttttttaaaatngttctccancattttatggctcctccctcccatgtcctcaaacccagcaaaagcgtanaggcanaattanaggacccncccgggcggccgntaagggcnaattccagcncactggcggccgttactagnggatccnagctcggnnccaagctnggcgtaatcatggncatagctgtttcctgtgan

SEQ ID NO: 617 - DNA, 215 bp, Homo sapiens
cctactatgggtgttaaattttttactctctctacaaggttttttcctagtgtccaaagagctgttcctctttggactaccagttaaatttacaaggggatttagagggttctgtgggcaaatttaaagttgaactaagattctatcttggacaaccagctatcaccaggctcggtaggtttgtcgcctctacctataaatcttcccactatttt

SEQ ID NO: 618 - DNA, 433 bp, Homo sapiens
  misc_feature 8: n = A,T,C or G
cttttgtntgcctgttttgtggactggctggctctgttagaactctgtccaaaaagtgcatggaatataacttgtaaagcttcccacaattgacaatatatatgcatgtgtttaaaccaaatccagaaagcttaaacaatagagctgcataatagtatttattaaagaatcacaactgtaaacatgagaataacttaaggattctagtttagttttttgtaattgcaaattatatttttgctgctgatatattagaataatttttaaatgtcatcttgaaatagaaatatgtattttaagcactcacgcaaaggtaaatgaacacgttttaaatgtgtgtgttgctaattttttccataagaattgtaaacattgaactgaacaaattacccataatggatttggttaatgacttatgagcaagctggtttgg

SEQ ID NO: 619 - DNA, 259 bp, Homo sapiens
ctgcagtgtccctttttatatcatgctagtgttgagacatacttgactaacttgggaacagttcgatatattgacaaccgtcaacttaagaaaatcaacagcttttggccccagcgtccaagtgaacttttcatggagtgcagaatctcaaatggacaaaatactttgtctttttaaatactgaaaatttaattattagtactatgactgaaagattcttcatggctaaaaagctctgcatcaaactcaattcaggagg

SEQ ID NO: 620 - DNA, 393 bp, Homo sapiens
ccaccaaagccacacggagattctgtcaggcgctgagacaccacagccttttcaatcttagggaaagaaatcaagtcatataaattaatatcaacaggtaaggtcattgagcaattgtctttcaactgtctaagactttatcacttaagatcataaacacagaagcaggtcataaaaatagcttttcttaaggtttaggagaatttgtaggggcacttacttgataatctgaattttctagtcagaagtttaaataccaccttttaaaaacataaaatttaatttgtaacaagttattaacaaagcagtattgtcgaaagttttaagctttctcccaataatttaattacattaattaaatttttaccattctaatggttacaaagtaaccag

SEQ ID NO: 621 - DNA, 563 bp, Homo sapiens
ctgacaatgataaaattatctctatatgggcaaacgcgtgctctttgtcgaagaagaaagcttcagcttcatgttccaggtgagttaattaggcaatgtatgaatgctaatatctctttcacatattttgcttaagatctgtcttaggactctcgtctggcccatatggttttccaagggcagaagggcctctttttgatgagaggcagttttcagtaactcttaaagtgataacagcaaaggagaggagagagaagagtaagacaaatcgaaacattcttcaattgcttcttggccttttggctaagctcaagctcaaaacaggtcttcaaggagaaaatacatcacaaagaaaaggatgttttatttcttaccttgtcctagaaaaatttccataaactctattggcttaattctgtaaacttgaccaatatcagagtgcttcctaccaaggagggtagctgatgagcgtgaccatggtacatcctagaagaatgtgtgatgaagaagctttcaccgtgtaaaagagttgaaaattattcaaggagacattatggtcttgg

SEQ ID NO: 622 - DNA, 505 bp, Homo sapiens
  misc_feature 194, 436, 484: n = A,T,C or G
tcttaagtgtgtttaatagataaagtaaactttcctagtcaagggttagatttttattatctcttgtgttccgactttctacttttcaactttgaacttcaaaaaaacattactttgcttatcctttgtactttgatcaggttgtttagaattgtagatcaaaccattctttgatcattttattgtttaaatgnttagttccatttataatttttatagccaactctcggttatttctgtcttttgagattgcaattcagaagctgtatgtcgaagtaatttatgagttgacttttatacttaggcttctttaaatactaatagtcaagaattctagagcatctaataaaaaattaactttcagatcattgggaatctgtcctcatttaaatatgtgtaaatgcatttccacagcaaattgcttcatgccctttgnctataaggaaattattccttgtagctaatacatttttcattttgcagnccaaatcttttttgagaaagg

SEQ ID NO: 623 - DNA, 489 bp, Homo sapiens
cctactatgggtgttaaattttttactctctctacaaggttttttcctagtgtccaaagagctgttcctctttggactaacagttaaatttacaaggggatttagagggttctgtgggcaaatttaaagttgaactaagattctatcttggacaaccagctatcaccaggctcggtaggtttgtcgcctctacctataaatcttcccactattttgctacatagacgggtgtgctcttttagctgttcttaggtagctcgtctggtttcgggggtcttagctttggctctccttgcaaagttatttctagttaattcattatgcagaaggtataggggttagtccttgctatattatgcttggttataatttttcatctttcccttgcggtactatatctattgcgccaggtttcaatttctatcgctatactttatttgggtaaatggtttggctaaggttgtctggtagtaaggtggagtgggtttg

SEQ ID NO: 624 - DNA, 233 bp, Homo sapiens
gttggggaacagctaaataggttgttgttgatttggttaaaaaatagtagggggatgatgctaataattaggctgtgggtggttgtgttgattcaaattatgtgttttttggagagtcatgtcagtggtagtaatataattgttgggacgattagttttagcattggagtaggtttaggttatgtacgtagtctaggccatatgtgttggagattgagactagtagggctagg

SEQ ID NO: 625 - DNA, 459 bp, Homo sapiens
ttcgagaacatttttaataaataatgtgacaaaattacttttctgattattggattttcagtatgcaaaattatggctaaaaataaggggcttcttacatgaacataatgaaaacattaatcacatggattgttcccttagtactgcacgccttttctatggaactttttcaaattatctaaatgaacaagtttggttttggtgaacaccagcctttttttttgtggttcagttttgtttggctttgtcttccactggggtcagacctgatacttatctatctatgaataaatgtacatttttttcttcaaatagcaccaattataaaatcaatgatattcataaaatgacaaaaaaggatcatagaaatctactagtcagagggcatcatttgtcaattgaaagcaagtaatgcctctattagagattttaaggaaatcttgtaggtttcgacattgg

SEQ ID NO: 626 - DNA, 458 bp, Homo sapiens
cctgatgattgttttaaacagtagaaagggttcagctaagaactacagtccactctcagccctgtcatgtactataggacaagtcttcattcacaacaaatggatagcaacaccaatctcgtaacactgggaaaactgcatacaatatttagaaggaacactaatacagcagaatctgcacacaacggagtcaaagatctgaggccaaatcctactacactttacgactttgagttggtcacttttctgaaccttagcttctccatcagtgtaaaactgatgtaaaataatataaagctatatgaaagctgatgtgatttacttgtgaaatagtatgtgcaaaaggactttgtaaaatgtaaagcactatgctggttattgtgatatctgagatatttttaaagttgcaattcaattcaacaagcattcatttagagtcatgtgcaaggcactgtgct

SEQ ID NO: 627 - DNA, 393 bp, Homo sapiens
  misc_feature 5, 6: n = A,T,C or G
ccatnngaacgcactcaggaggtggtttgttctggatgcagaaaccagagatctagtttctatccacacagacgggaatgaacagctctctgtgatgcgctactcaatagatggtaccttcctggctgtaggatctcatgacaactttatttacctctatgtagtctctgaaaatggaagaaaatatagcagatatggaaggtgcactggacattccagctacatcacacaccttgactggtccccagacaacaagtatataatgtctaactcgggagactatgaaatattgtactgggacattccaaatggctgcaaactaatcaggaatcgatcggattgtaaggacatttgattggaccgacatatacctgtgggctaggacttccagga

SEQ ID NO: 628 - DNA, 233 bp, Homo sapiens
  misc_feature 35, 36, 192: n = A,T,C or G
ctggatttataaaatagttgaatgacaaaagaagnntgttttgacagtaaaaaaaagacattatggacaaaatatgcaaaatgtgcaaagaaaaaataaatttgcattagaaaggtgggcatttgatctctgagccctgtgccatgtaacattgccatgttctttcactgttgtttgaatgttgtaccccancccttgactctggacttaaggcaagctatgactggctttgg

SEQ ID NO: 629 - DNA, 450 bp, Homo sapiens
  misc_feature 3, 11, 240: n = A,T,C or G
ccnggacaatntaggcaggagaaggaaataaagggtattcaattaggaaaagaggaagtcaaattgtccctgtttgcagatgacatgattgtatatctagaaaaccccattgcctcagcccaaaatctccttaagctgataagcaactccagcaaagtcgcaggatacaaaatcaatggacacaaatcacaaacattcttatacaccaataacagacaaacagaggccaaatcacgagtngaactctattccaattgctttcaagaaaattaaaatacctagggatccaacttacaagggacatgaaggacctcttcaaggagaaactacaaaccactgctcaatgaaataaaagaggatacaaagaaatggaagaacattccatgctcattggtagcttgatggggatggcattgaatctataaattaccttgggcagtatggacctca

SEQ ID NO: 630 - DNA, 486 bp, Homo sapiens
cctactatgggtgttaaattttttactctctctacaaggttttttcctagtgtccaaagagctgttcctctttggactaacagttaaatttacaaggggatttagagggttctgtgggcaaatttaaagttgaactaagattctatcttggacaaccagctatcaccaggctcggtaggtttgtcgcctctacctataaatcttcccactattttgctacatagacgggtgtgctcttttagctgttcttaggtagctcgtctggtttcgggggtcttagctttggctctccttgcaaagttatttctagttaattcattatgcagaaggtataggggttagtccttgctatattatgcttggttataatttttcatctttcccttgcggtactatatctattgcgccaggtttcaatttctatcgcctatactttatttgggtaaatggtttggctaaggttgtctggtagtaaggtggagtggg

SEQ ID NO: 631 - DNA, 211 bp, Homo sapiens
tttacataaatattatactagcatttaccatctcacttctaggaatactagtatatcgctcacacctcatatcctccctactatgcctagaaggaataatactatcactgttcattatagctactctcataaccctcaacacccactccctcttagccaatattgtgcctattgccatactagtctttgccgcctgcgatgcagcggtagg

SEQ ID NO: 632 - DNA, 293 bp, Homo sapiens
  misc_feature 191, 262: n = A,T,C or G
cagcgcaagtaggtctacaagacgctacttcccctatcatagaagagcttatcacctttcatgatcacgccctcatagtcatttttccttatctgcttcctagtcctgtatgcccttttcctaacactcacaacaaaactaactaatactaacatctcagacgctcaggaaatagaaaccgtctgaactangctgcccgccatcatcctagtcctcatcgccctcccatccctacgcatcctttacataacagacgaggtcnacgatccctcccttaccatcaaatcaattgg

SEQ ID NO: 633 - DNA, 263 bp, Homo sapiens
  misc_feature 1, 194: n = A,T,C or G
nggtctgcagtgtccctttttatatcatgctagtgttgagacatacttgactaacttgggaacagttcgatatattgacaaccgtcaacttaagaaaatcaacagcttttggccccagcgtccaagtgaacttttcatggagtgcagaatctcaaatggacaaaatactttgtctttttaaatactgaaaattnaattattagtactatgactgaaagattcttcatggctaaaaagctctgcatcaaactcaattcaggagg

SEQ ID NO: 634 - DNA, 491 bp, Homo sapiens
cctactatgggtgttaaattttttactctctctacaaggttttttcctagtgtccaaagagctgttcctctttggactaacagttaaatttgcaaggggatttagagggttctgtgggcaaatttaaagttgaactaagattctatcttggacaaccagctatcaccaggctcggtaggtttgtcgcctctacctataaatcttcccactattttgctacatagacgggtgtgctcttttagctgttcttaggtagctcgtctggtttcgggggtcttagctttggctctccttgcaaagttatttctagttaattcattatgcagaaggtataggggttagtccttgctatattatgcttggttataatttttcatctttcccttgcggtactatatctattgcgccaggtttcaatttctatcgcctatactttatttgggtaaatggtttggctaaggttgtctggtagtaaggtggagtgggtttgg

SEQ ID NO: 635 - DNA, 270 bp, Homo sapiens
ccaattgatttgatggtaagggagggatcgttgacctcgtctgttatgtaaaggatgcgtagggatgggagggcgatgaggactaggatgatggcgggcaggatagttcagacggtttctatttcctgagcgtctgagatgttagtattagttagttttgttgtgagtgttaggaaaagggcatacaggactaggaagcagataaggaaaatgactatgagggcgtgatcatgaaaggtgataagctcttctatgataggggaagtagcg

SEQ ID NO: 636 - DNA, 383 bp, Homo sapiens
cctactatgggtgttaaattttttactctctctacaaggttttttcctagtgtccaaagagctgttcctctttggactaacagttaaatttacaaggggatttagagggttctgtgggcaaatttaaagttgaactaagattctatcttggacaaccagctatcaccaggctcggtaggtttgtcgcctctacctataaatcttcccactattttgctacatagacgggtgtgctcttttagctgttcttaggtagctcgtctggtttcgggggtcttagctttggctctccttgcaaagttatttctagttaattcattatgcagaaggtataggggttagtccttgctatattatgcttggttataatttttcatctttcc

SEQ ID NO: 637 - DNA, 537 bp, Homo sapiens
  misc_feature 26, 516: n = A,T,C or G
ttttaatcctggggtatataggcagnactttaaattgcaaagtcttccgggcctattttcctctacatttttgtaattaactctgggggcttacttgttttggcagtactgaaatcaaaggagctggttcttcttttctcccaattattttcatatgaaagcacctacaattagcctgttagtcctattcagatacatcaaatatcagtgaatgctttactattcgcacatttaagcatctttgttttacataaaattagagtatgaaaaccagtgttcaattttttatcttgttgagcttgtaaaatgccagcaatttaaaactaggacttttccccccataagccaaggaggtagaattactaatacaagggttaaagaaggtagattttgttttcaatatttgggtaatattagaaagattcttcccacagggaagaactagcaagtgtcccaattttttccaaacgttggggaggggaaaattcactgtatcatgaaaccctaagggtttgngtgcacttcctgctttttagg

SEQ ID NO: 638 - DNA, 445 bp, Homo sapiens
  misc_feature 15: n = A,T,C or G
ccagcagaacacagnagtgatttggtcccgtttgttccccagtggggtatctatccttgtgcagggcacaagcctacatggtggctctggtcatatcattagaaaatagacagaaatgggctgcacaccagaatgaatgaattgaattgaaagggaggagtgatggtggaaaaaaaaacaagtcaattcatttagactggtagaaccagaaccactgtgtagtacatccaaacggttaaaattccctggaagatgttacataatcctatcatggtgtttatttatggaaatctattttaaaaattttatgtaatactgcacagtctgtttgcatgatgccttgtacgtagtagcaactcagtaaatactttttgaatgaactagtatagtattttaattagctagtcttcgtgtactggtacaaaagaacagtgtcatcttacag

SEQ ID NO: 639 - DNA, 584 bp, Homo sapiens
gcttgagtattctatagtgtcacctaaatagcttggcgtaatcatggtcatagctgtttcctgtgtgaaattgttatccgctcacaattccacacaacatacgagccggaagcataaagtgtaaagcctggggtgcctaatgagtgagctaactcacattaattgcgttgcgctcactgcccgctttccagtcgggaaacctgtcgtgccagctgcattaatgaatcggccaacgcgcggggagaggcggtttgcgtattgggcgctcttccgcttcctcgctcactgactcgctgcgctcggtcgttcggctgcggcgagcggtatcagctcactcaaaggcggtaatacggttatccacagaatcaggggataacgcaggaaagaacatgtgagcaaaaggccagcaaaaggccaggaaccgtaaaaaggccgcgttgctggcgtttttccataggctccgcccccctgacgagcatcacaaaaatcgacgctcaagtcaagaggtggcgaaacccgacaggactataaagataccaggcgtttccccctggaagctccctcgtgcgctctcctgttccgac

SEQ ID NO: 640 - DNA, 404 bp, Homo sapiens
ccataggaacgcactcaggcaggtggtttgttctggatgcagaaaccagagatctagtttctatccacacagacgggaatgaacagctctctgtgatgcgctactcaatagatggtaccttcctggctgtaggatctcatgacaactttatttacctctatgtagtctctgaaaatggaagaaaatataggagatatggaaggtgcactggacattccagctacatcacacaccttgactggtccccagacaacaagtatataatgtctaactcgggagactatgaaatattgtactgggacattccaaatggctgcaaactaatcaggaatcgatcggattgtaaggacattgattggacgacatatacctgtgtgctaggatttcaagtatttggtgtctgg

SEQ ID NO: 641 - DNA, 138 bp, Homo sapiens
  misc_feature 127: n = A,T,C or G
ctgtgacaggaacattacctgaagtgcagggtggttacctgcacaaagtcccatttccaaaaatttctgtgtaattcaccagaaattttggatggaataattagaaaaaaaaaaagaggttaaaacntgtaactcaaa

SEQ ID NO: 642 - DNA, 381 bp, Homo sapiens
  misc_feature 372: n = A,T,C or G
ctgtaggtggaatttttacccagaaaagataggccctagaagcctcatttcttttctccatggaaaaggacagccctctgctgcagcgttcaacttgtgtgtttactgacagagtgaactacagaaatagcttttcttcctaaaggggattgttctacattttgaagttattttttaataaaattgaattatgttgtgtattgtgcttcctaataggaaatgcattattggactgtttttgtaacatcctgtttattgcaaatagctagtatcgttcaaaaactgtataaaatacttttgtacatattagcaatgtctaatttgtatacacttcagttaaatttccctaaaacttgaaaggggaccttgtanaaattaaaa

SEQ ID NO: 643 - DNA, 403 bp, Homo sapiens
ccttcctaaaaaatagtggtgagctggaggctacttccgccttcttagcgtctggtcagagagctgatggatatcccatttggtcccgacaagatgacatagatttgcaaaaagatgatgaggataccagagaggcattggtcaaaaaatttggtgctcagaatgtagctcggaggattgaatttcgaaagaaataattggcaagataatgagaaaagaaaaaagtcatggtaggtgaggtggttaaaaaaaattgtgaccaatgaactttagagagttcttgcattggaactggcacttattttctgaccatcgctgctgttgctctgtgagtcctagatttttgtagccaagcagagttgtagagggggataaaaagaaaagaaattggatgtatttacag

SEQ ID NO: 644 - DNA, 688 bp, Homo sapiens
  misc_feature 653, 666: n = A,T,C or G
cctatttatttgttttggccctggatctttcctaatcacaattatatttctttatttttgcctttgagcagtttcatttatctttgtgggcagggaagattaaatatgaaattcagtccagtcattttgctactggttagctttagtttgaggcaagtaaaaatttttgattaaaattagtttcttaaaattatgcccttgctttaccaaataatcaaattggctaaaaaataagggtatgtaactttgcattttgaagaacaaaccaataatttttcatgagccctactcgatcttctttaaagaagaccttcctaagagacaattagggatgagtttgattaatgggaaatagctctaggttagattattttaaattccatacaccaagtgatttaaccacagtggcagtggcagcttctgaaccgtcaagtatgaacatcacttaaaaattaaaagatgcttaataataaactcttaattttcattaagccaatctgtaattcagaagaaaagcatatgtctgccatgggactattgcagtgcgtctccatcagtgttaacacaggagagatatgttattttatgtgtatgtcttagtttgggatatgtggtagtaagaacatgtcaagagtgcttttcttcaaacctgncagctcaactgangaaagacaggtacttccattgc

SEQ ID NO: 645 - DNA, 484 bp, Homo sapiens
  misc_feature 460: n = A,T,C or G
ccaaatgtgtctccagcccacacttccaggtggcagagcgagctctctattactggaataatgaatacatcatgagtttaatcagtgacaacgcagcgaagattctgcccatcatgtttccttccttgtaccgcaactcaaagacccattggaacaagacaatacatggcttgatatacaacgccctgaagctcttcatggagatgaaccaaaagctatttgatgactgtacacaacagttcaaagcagagaaactaaaagagaagctaaaaatgaaagaacgggaagaagcatgggttaaaatagaaaatctagccaaagccaatccccaggtactaaaaaagagaataacatgaaaacgcccagggttacttgaatgtttttataagataggaatatatgtcttcaccatgggggggggtctcggatttcactaacgttgtatatgaaaatgggtgcnataaaaagtacttttaaactttgt

SEQ ID NO: 646 - DNA, 447 bp, Homo sapiens
  misc_feature 413: n = A,T,C or G
gggtcgcgttgaacaacttggttcaagatggtgggggcatttttagagcggcaataattgaaaaaaaaggcgaactctgccttggagaggtagatgataagaaataaaaaggtgtttataactattttgtattataaagtgggccttagagataggaagaagaatgatggattccttttggatcaatcagaaaggaaacacgaaagaaaagtcaggaaggtagagagagaaaaagggagggaaggagaaagaatgggaataaaataaggaggtaagagatactatttttgctgagcaaccagtgtgtttcaggatgatacaaagaaaaatatagaatagaaataagtgcaggcttggaatcagctacaaatcctaaagatggggtgtgtgtggatgtgtgtgtgtgtgtgtgnacaccattgtgtgtttgtaaaatgtgtatgtccc

SEQ ID NO: 647 - DNA, 388 bp, Homo sapiens
gaaggtgatataaaatgactgtcatcatttggagtgtgcagtacagttacttcatgttcctcaggtttagaacaatttcccctgcaagttctcacacagataggcagaaatcataactaattttggttaatcactatggcagccgttgaagaatttaagagaacctgccagtaagatttggaataagattctatattattgcatccacagaaaagaatgtactgatatactataaactctaggagaaaacttaattgaaatagtgttattaagtgttgaaagtaccataaaaatataagggaaaataagctttcctagaatttttcagtgttctagtttttaaacagtgatgttttttattaacctatttcatccattcaaagacagg

SEQ ID NO: 648 - DNA, 632 bp, Homo sapiens
  misc_feature 12, 24, 33, 483, 539, 626, 629, 630: n = A,T,C or G
cctggctgggcntttgacctgcgnttttaaatnactcacagagggtgggacaggaggaagagtgaaggaaaaggtcaaacctgttttaagggcaacctgcctttgttctgaattggtcttaagaacattaccagctccaggtttaaattgttcagtttcatgcagttccaatagctgatcattgttgagatgaggacaaaatcctttgtcctcactagtttgctttacatttttgaaaagtattatttttgtccaagtgcttatcaactaaaccttgtgttaggtaagaatggaatttattaagtgaatcagtgtgacccttcttgtcataagattatcttaaagctgaagccaaaatatgcttcaaaagaagaggactttattgttcattgtagttcatacattcaaagcatctgaactgtagtttctatagcaagccaattacatccataagtggagaaggaaatagatagatgtcaaagnatgattggtggagggagcaaggttgaagataatctggggttgaaattttctagttntcattccgtacatttttagttagacatcagatttgaaatattaatgttacctcctcaatggggtggtatcagacctgcccgggcggncgnntc

SEQ ID NO: 649 - DNA, 300 bp, Homo sapiens
  misc_feature 1, 15: n = A,T,C or G
nggtgaagatagaanaaatataagcgaaattggataaaatagcactgaaaaaatgaggaaattattggtaaccaatttattttaaaagcccatcaatttaatttctggtggtgcagaagttagaaggtaaagcttgagaagatgagggtgtttacgtagaccagaaccaatttagaagaatacttgaagctagaaggggaagttggttaaaaatcacatcaaaaagctactaaaaggactggtgtaatttaaaaaaaactaaggcagaaggctttggaagagttagaagaatttggaagg

SEQ ID NO: 650 - DNA, 498 bp, Homo sapiens
  misc_feature 1, 4, 8, 26, 255: n = A,T,C or G
ngtnctgntaaacagaagggtacaangcccttctggctttaagcagtcataggaatgtgacagacattcctcttagggagcgcctcctcctagggtttcctcatctgtctcacactgagtggatgtaatgctattttaatcctgctgtggcccccaatactagtacttgtccataccttcttgcatttttagcgtctgctctgtggggttgttaggccctggcactcccaggaactagtgctaaagctgcatctntctctcccctctagggatcgataaagtttcactgcagaaagtctccactgcggtatgctgacatctgccctgaaccttcaccctacagcattacaggctttaatcagattctgctggaaagacacaggctgatccacgtgacctcttctgccttcactgggctggggtgatccttggtgcctttgtttccacaaggccttttcctgccccctgccttgccaaagacatttaatcagcacacag

SEQ ID NO: 651 - DNA, 654 bp, Homo sapiens
  misc_feature 149, 268, 375, 508, 578, 595, 615: n = A,T,C or G
ctgagggtccccaggtttctaaagctctcaggacgagaaagtaggtcccaagataaggagcctaaagggcttttttctttctgtgtattccttcttggcctccaacatgggtacagtcacaagagcatgtaacagagaagaaggactanacctaccattttctggataaagaattggaaagaggatccacaggtaaccaaaaagtaccagggaaatggcagagaaggaaaacctcaggagaccaacctcataagtggtatttattagngcctgggctcaaatccaaattgtacatgaatatgtctggtcctagatagggtaccgaagactttgaaagtgaattttggtatatcattgcccagattccagactggntattgtgtgacacaacatacaggatatatctgaatagtgctcagaagagtttgaaaatgcaaatgatattaaaataaagatgaaaaagagaaagctggtcagaacttgtggacataacccttctggatctgtngcctgattaaaaaatagttgatattctcgaatgaattaaaacaagatttagagactgagcatggtagctnattcttgtaatccaacnctttgggagggcaaggcaanagaattgcttgcggccaggagttttgagaccagcttggg

SEQ ID NO: 652 - DNA, 293 bp, Homo sapiens
  misc_feature 1, 193: n = A,T,C or G
ngtctgttgcactgaggtgactaaggatacattttgaggaagtagctccaagaacatttccattttcactgtgccttcacatacatctaatggaaatgaacagcacccttcatccatccacggaagcgattaagaaaagggtgggatggaaaaattaacccaacaatattagatcaatacgtagtatttaagngtccataatgtgccaggctgaagatgcacgggaaaaccacactagccggtctgtcaagggcttgagaataccataaacaagaaaacagacgaaccaattt

SEQ ID NO: 653 - DNA, 294 bp, Homo sapiens
  misc_feature 1: n = A,T,C or G
ngtccaccactgcagccctacatacagttgaaaaaaaattccattctgttaacatttgttttataagttttcacgcaatacacaaaaaacccctctgcacttcttgtaaagaacaaaaaagatacacaacagttaagcgtaaagatcacaggcaatagcattcaaacatggatgtgggtagagaaaggagtacctggcatgagtacctgcttagtttgactgaatccttgatttttaatttggcttttcatgggccgctcacaacaccaacgctgtgtgaggtatggtagtcag

SEQ ID NO: 654 - DNA, 250 bp, Homo sapiens
ctgtccttgaacaagtatcaatgtgtttatgaaaggaagatctaaatcagacaggagttggtctacatagtagtaatccattgttggaatggaacccttgctatagtagtgacaaagtgaaaggaaatttaggaggcataggccatttcaggcagcataagtaatctcctgtcctttggcagaagctcctttagattgggatagattccaaataaagaatctagaaataggagaagatttaattatgagg

SEQ ID NO: 655 - DNA, 494 bp, Homo sapiens
ccattataattttataacaccattaccctttaaattctaccgattataagcagcgtaaaagtaactatataaagcaaacatcgcaaaggaactctgcaggagctcttaattcctttatgtagctatcataaaattcactttcctgaagacatttactctcattcacttccaaactccaaacctttttctggtagcaccacttttgtttttaatagaaagatgagttcatatctgtacatctctccaaagctctaaggaatgagaaaaggatcctagtatattgaaattactgatgtttaatacctctgccttttcactaaaagccatttaatatttttaaagtcaaaacttgacatacaggtatttataaggaatctccatgactctgaaggaatgaaattgatgtaggtagctttggctatgtaaagacatagtagaggacaattacttaaagaagagttttcttttgaggatttgtagatttgactaagcag

SEQ ID NO: 656 - DNA, 477 bp, Homo sapiens
cgcgttactgtacatattgctagcaggagacaactggaaatactaaacaaatactggaattcacattacagacagacgaaaccaacatggatgccacacataacttcctttgtagtttcacagagggcctatttgtggttgctcaggtggggtcatacattgcttgcagaaatggcctgatcatagctctatgaaacaatgaattcggaatgaaatcttaccatgacacctctctgtaggaaagaaatgttgcttcacgtgtgctaagttgagataataatatttcacatatttatatacagagaatcactctcaaatttaacccaagataagcaataggatttgggggtgacttgtacacatttctaacaacacttttcttttttctagaggtcactctcaaacactgatatatcactatagtttgagtgtagggattcagtaatcaaaggttgttattgcaaaagagccaggcag

SEQ ID NO: 657 - DNA, 576 bp, Homo sapiens
  misc_feature 13: n = A,T,C or G
cctctacctgtanatcactatttttctaaagacaatttggtgttttgaagataaatgtcattagtctatgataatagcatcataggacaattagccattttagacttgaccatattttctctttttagcatatagccatcttgatatttaggtgggagactactccaatggagcaacagtttcattttacatgattggatttagaaatttacaaattttaaactcataagaattctaaataatttgaaaatggaaacatttgacccacagtctagcagcataaatacatttataaaatacttcattgttgatcttaggtcattgatttaaaacagaatttggtgactatgggcaggtggagggggccagtgaggaaggtataaaagagaaatctttatgaattgtgttcagattgattttgtataaacataatatattcatggttgtatctcttatttataatacccaactaacatgaaggtggtccaagggaaggatcaatattttaaataacatatttgcttaaaatatcatacagtggctgcttcataaaaaatcttataaacttttattacc

SEQ ID NO: 658 - DNA, 344 bp, Homo sapiens
  misc_feature 14: n = A,T,C or G
cctgaaaagaaagntgctcttatggactcttgcatgttaagactatgtcttcacatcatggtgcaaatcacatgtacccaatgactccggctttgacacaacaccttaccatcatcatgccatgatggcttccacaaagcattaaacctggtaaccagagattactggtggctccagcgttgttagatgttcatgaaatgtgaccacctctcaatcacctttgagggctaaagagtagcacatcaaaaggactccaaaatcccatacccaactcttaagagatttgtcctggtacttcagaaagaattttcatgagtgttcttaattggctggaaaagcaccag

SEQ ID NO: 659 - DNA, 230 bp, Homo sapiens
ctgctttccctgctaaacagttccagagcaaaagcagcaaaaagaaaatatgggagggatatgggcaacgtatactcgaacgtacgcagagaagagagtacggttagctctaatatttctcattgaacttggtggtatgtgccttccctgcatataaggccatagtgcttttttgggagcgctagaatatccatccacttgacagtgaccacaaaataggctgtttccag

SEQ ID NO: 660 - DNA, 80 bp, Homo sapiens
ctggtccttgttaaactcgatcaccactttggagagatcgactggaggctcctgggtgttctgaggggcctgggggacag

SEQ ID NO: 661 - DNA, 535 bp, Homo sapiens
  misc_feature 411, 413, 416, 422, 439, 470, 471, 479, 490, 492, 496, 501,511: n = A,T,C or G
ctgaaccatatctgattaactctttggtctctgttattggaacaaaaccgacgctatgcctgcagccgccagactgcaaccaaaaacacagtttggggtcagaagacattaaaaatcacaataaaataggatgaatgttctaagtcacgcaactgaatcaaggcacctttttttttcaaaagcaaaaagttgtttaacaatattccagaatagtagatacttcaaaaaccagattacagtatatatcattttgctgcacattttagtctattttctgtatacatagtcacacattctttaccctctcccaacttatacatgctttatccccccagtcatgtgctatgtaggtataaaaaaataaagttgtatctaaacaagtgatttaaaaaaaaaaactaacgaatgccncnatnataacnctgaacttgtttccctnttgaaggacattggaaatgttaccgaggttnntttacctnggccgcaaccncnctangggcnaattccagcncactgggggccgttactaggggat

SEQ ID NO: 662 - DNA, 257 bp, Homo sapiens
cctgactaaagcacatatcacactccctacacttccatgttttctctcccatgtggaccctctgatgcatatcaagattcaagcgcctgttgtagcccttcccacagtcctcacatttgtatggcttttctacactgtgaactttttcttgcactttagagaatgaattctgtacaatgttcttcccatgctgctcacatttgagaggtgtttctctgctgtggcgtctctgatgggtcagacgagttgaggaccag

SEQ ID NO: 663 - DNA, 516 bp, Homo sapiens
  misc_feature 36: n = A,T,C or G
ccaattataggtattttattttttaaagattagagngttcttgaagctctttctatttctttgtcaatgaactaaacattggcaaatatgtagggtttcccacataagaacattattaacatcaaaatagaaagctggtggtagaaataatgattgggaacacagagtctctactcagcgttctacttctgccataccataactttgtgatctcacgaaatatctctccatgttctcatccctatgtatagttctgtcatttttcaataagagctttttgcttaattatgaagtactagttactataaccattattttgagcttcatgtaaatcaagaacacatggactccacttgcaaaacattgaaaatgtagttagggattgggggcaaaaagcaacattttaaaatgtgtaaagacaatgagtaagcaacaaagtgtccaattttttaggcgaaagttgcatatgtcaggaaaaggcaggattaagtaatagagaatttgaatgataactgg

SEQ ID NO: 664 - DNA, 212 bp, Homo sapiens
gtccgaggaggttagttgtggcaataaaaatgattaaggatactagtataagagatcaggttcgtcctttagtgttgtgtatggctatcatttgttttgaggttagtttgattagtcattgttgggtggtaattagtcggttgttgatgagatatttggaggtggggatcaatagagggggaaatagaatgatcagtactgcggcgggtagg

SEQ ID NO: 665 - DNA, 408 bp, Homo sapiens
  misc_feature 11, 18, 24, 270, 271, 275, 277, 280, 281, 287, 291, 295,298, 319, 325, 335, 337, 341, 344, 356, 360, 371, 375, 376,388, 390, 401, 407: n = A,T,C or G
atccaggggtncccggtngctgcngggaaacctccagccttgttcttcaaaccactcagctcatgtgttttgcgctgactagtactgaataatacaaccactcttatttaatgttagtattatttatttgacaactcagtgtctaacagcttgatatgcaggtccttgcatcctacatttctttaggaagttacccatttgtaactttaaaaacaggaaaaatatcagttggcaaatgcaatcttttttttttttaagctaaaggggggnnaacngnaannaaaatntttntgangtngggtctataagcacccttgangggatntgttaaaagngncatnaangggggattctcntttngcaaaaaaatntaannatcaatttatananctttatttttnactttnt

SEQ ID NO: 666 - DNA, 635 bp, Homo sapiens
  misc_feature 7, 503, 540, 564, 577, 581, 616, 635: n = A,T,C or G
ctgaagnacaagggtcaggcaaaaataagatcacaatcaccaatgaccagaatcgcctgacacctgaagaaatcgaaaggatggttaatgatgctgagaagtttgctgaggaagacaaaaagctcaaggagcgcattgatactagaaatgagttggaaagctatgcctattctctaaagaatcagattggagataaagaaaagctgggaggtaaaccttcctctgaagataaggagaccatggaaaaagctgtagaagaaaagattgaatggctggaaagccaccaagatgctgacattgaagacttcaaagctaagaagaaggaactggaagaaattgttcaaccaattatcagcaaactctatggaagtgcaggccctcccccaactggtgaagaggatacagcagaaaaagatgagttgtagacactgatctgctagtgctgtaatattgtaaatactggactcaggaacttttgttaggaaaaaattgaaagaacttanctctcgaatgtcattggaatcttcacctcacagtggngttgaaactgctatagcctaagcnggctgtttactgntttncattagcaggtgctcaccatgtctttggggtgggnggggggagaaagaaagaan

SEQ ID NO: 667 - DNA, 388 bp, Homo sapiens
gaaggtgatataaaatgactgtcatcatttggagtgtgcagtacagttacttcatgttcctcaggtttagaacaatttcccctgtaagttctcacacagataggcagaaatcataactaattttggttaatcactatggcagccgttgaagaatttaagagaacctgccagtaagatttggaataagattctatattattgcatccacagaaaagaatgtactgatatactataaactctaggagaaaacttaattgaaatagtgttattaagtgttgaaagtaccataaaaatataagggaaaataagctttcctagaatttttcagtgttctagtttttaaacagtgatgttttttattaacctatttcatccattcaaagacagg

SEQ ID NO: 668 - DNA, 498 bp, Homo sapiens
  misc_feature 417, 470, 484: n = A,T,C or G
tgatcttaacaaaattcgtagcagtggaaccttgaaatgcatgtggctagatttatgctaaaatgattctcagttagcattttagtaacacttcaaaggtttttttttgtttgttttctagacttaataaaagcttaggattaattagaagaagcaatctagttaaatttcccatttgtattttattttcttgaatacttttttcatagttattcgtttaaaaagatttaaaaatcattgcactttggtcagaaaaataataaatatatcttatgaatgtttgattcccttccttgctatttttattcagtagatttttgtttggcatcatgttgaagcaccgaaagataaatgatttttaaaaggctatagagtccaaaggaatgttcttttacaccaattcttcctttaaaaatntctgaggaatttgttttcgccttacttttttttcttctgtcacaatgctaagnggtatccgaggttnttaatatgagattt

SEQ ID NO: 669 - DNA, 622 bp, Homo sapiens
ccttagccaaagaatgcagtggagccttcccccttcaactgcattgtgaatgaataccaattaacagcataaaaattaatagtcccatatcagatctggaaggggtttctggggctgtctgatgtccctatcctgttgtagtgaacacaatagcagaaaattctttctgggtccatctgctataaagtcttggtaaaacagcattactatgaagaggatgaactcacctaccttcagatggaggaaaagtgaaaaggacttaggctttagtcctccatgacttttcttaagcactacctacctgtaataagctgagtgcaaaaggatgccgaagaaaatctgcacccagaagctgttagaaagcactgcagagaacagggtatgaagaaaataaagagttcttaataaacccttaagattctttgttcaaggtaaccttgccaaaagggcagagtaggtggcaaagagttgcttttaatctagctctacactgcatttgaaaataaaatttgcccattttgaatatattgtttataattaaatgtgctttttacactgcaggtcaatataaaaactggttagtaaatttccagcgagcatttatgttcatttgctcacagca

SEQ ID NO: 670 - DNA, 477 bp, Homo sapiens
ttgggccctctagatgcatgctcgagcggccgccagtgtgatggatatctgcagaattcgcccttgccgcccgggcaggtgatggatgaggagcaaaaactttatacggatgatgaagatgatatctacaaggctaataacattgcctatgaagatgtggtcgggggagaagactggaacccagtagaggagaaaatagagagtcaaacccaggaagaggtgagagacagcaaagagaatatagaaaaaaatgaacaaatcaacgatgagatgaaacgctcagggcagcttggcatccaggaagaagatcttcggaaagagagtaaagaccaactctcagatgatgtctccaaagtaattgcctatttgaaaaggttagtaaatgctgcaggaagtgggaggttacagaatgggcaaaatggggaaagggccaccaggctttttgagaaacctcttgattctcagtctatttatcag

SEQ ID NO: 671 - DNA, 127 bp, Homo sapiens
gtgtgtgtgtctacttgggcgtgtttaacgtgtgcgtttgtgtctgcgtgtgcatgtgtctgtgtgtgcgcgtgtatttcagtttgggttgccggatcccatatgattgcgtgcctgtgtacctgag

SEQ ID NO: 672 - DNA, 400 bp, Homo sapiens
gggtctgcacagctatgttaacagcatccttataccaggagtaggaggaaagacacgactggaaaagcaattcaagctggtcacacagtgtaatgcaaaatatgtggaatgtttcagtgctcagaaagagtgtaacaaagaaaagaacagaaactcttcagttgtgccatctgagcgtgctcgagtgggtcttgcaccattgcctggaatgaaaggaacagattacattaatgcttcttatatcatgggctattataggagcaatgaatttattataactcagcatcctctgccacatactacgaaagatttctggcgaatgatttgggatcataacgcacagatcattgtcatgctgccagacaaccagagcttggcagaagatgagtttgtgtactgg

SEQ ID NO: 673 - DNA, 600 bp, Homo sapiens
  misc_feature 528, 590, 600: n = A,T,C or G
ctggcgttgctcattagtgaatgtatgacagcaggatgtgaggggatgcccaggagtcagtgttagcattgtcatctgagatcactgctattaatatcatccattaatttattagtgagcttcactatatgcagactgggagataaggagaaaatctgtcacattctctctagctaatcagatcagctaccaattaatgagattctgaatgaaatatcaatatgtgtttttctaatttggacctaggacagagctgttgcttgtcatagagaaaaacaataatgcttaaacatagcacattataattaaagcaggtttctcacatacttttcattttatcctttggataattttgtgaggaacgcaggacaccaacttccctttcatagatacaatccccatgctattgatgaaagtgtttttgaatgaagccatacaacaaataactgatcaaagtggcattacaccaaaatttcttagtaggactcctgcatagaatgtttagatagacgtgaaaagtttgttcangaggaccagcaagagagaaactgggttctttgggagggtttcggtgctacatttataccctncatcagagtn

SEQ ID NO: 674 - DNA, 140 bp, Homo sapiens
ggtggttggtgtaaatgagtgaggcaggagtccgaggaggttagttgtggcaataaaaatgattaaggatactagtataagagatcaggttcgtcctttagtgttgtgtatggctatcatttgttttgaggttagtttga

SEQ ID NO: 675 - DNA, 245 bp, Homo sapiens
gttgggtggttggtgtaaatgagtgaggcaggagtccgaggaggttagttgtggcaataaaaatgattaaggatactagtataagagatcaggttcgtcctttagtgttgtgtatggctatcatttgttttgaggttagtttgattagtcattgttgggtggtaattagtcggttgttgatgagatatttggaggtggggatcaatagagggggaaatagaatgatcagtactgcggcgggtagg

SEQ ID NO: 676 - DNA, 621 bp, Homo sapiens
  misc_feature 13, 21: n = A,T,C or G
ctgtccccagggnaaatagtngaattcaactaagatctgttaataagatgtcagaataactaataattttattaggaaaaaatcatgttttaaatttcaaaatgacacttatttgtcaagtaatatgatcttggaaaattttaaagaaaaataatcctacttataaactacttttttataattgttttcagaaaaaaagtttacagtcttaaggaaaatattcaggtctatcatatggtttgacagattttttaaaagttatttttggtaaggtcttcttttagaaaaaaattaatctcaagggttttttgtaccactataatctctaatacttactcagaattactgtgtatttacttaatttcttattatgtgccttattatgtgcttaagatacaataggttagagtttaatctaaatatcttgaaagctatattgtgggcttggtaagcattttgttttttctttctctgttttggtaaggatttaaaatttttttcattgcaattttaagtggttttcaataagtaatagtttttatcaaatttttggtgcttggtgcagagacggcgtggggaagggtgaatggttttgggaataattcagtgcacacctggggg

SEQ ID NO: 677 - DNA, 210 bp, Homo sapiens
  misc_feature 10: n = A,T,C or G
tttacataanatattatcagcatttaccatctcacttctaggaatactagtatatcgctcacacctcatatcctccctactatgcctagaaggaataatactatcactgttcattatagctactctcataaccctcaacacccactccctcttagccaatattgtgcctattgccatactagtctttgccgcctgcgaagcagcggtagg

SEQ ID NO: 678 - DNA, 383 bp, Homo sapiens
  misc_feature 86, 119, 120, 139, 140, 148, 162, 167, 175, 184, 222, 227,263, 270, 282, 327, 379: n = A,T,C or G
gtaggagtcaggtagttagggttaacgagggtggtaaggatggggggaattagggaagtcagggttagggtggttatagtagtgtncatggttattaggaaaatgagtagatatttgannaactgattaatgtttgggnntgagtttntatatcacagccanaattntatgatgnaccatgtancgaacaatgctacagggatgaatattatggagaagtantctantttgaagcttagggagagctgggttgtttgggttgnggctcantgtcagttccanataataacttcttggtctaggcacatgaatattgttgtggggaanagactgataataaaggtggatgcgacaatggattttacataatgggggtatnagtt

SEQ ID NO: 679 - DNA, 371 bp, Homo sapiens
aaaatgaaaatattgacaagagtttcagatagaaaatgaaaaacaagctaagacaagtattggagaagtatagaagatagaaaaatataaagccaaaaattggataaaatagcactgaaaaaatgaggaaattattggtaaccaatttattttaaaagcccatcaatttaatttctggtggtgcagaagttagaaggtaaagcttgagaagatgagggtgtttacgtagaccagaaccaatttagaagaatacttgaagctagaaggggaagttggttaaaaatcacatcaaaaagctactaaaaggactggtgtaatttaaaaaaaactaaggcagaaggcttttggaagagttagaagaatttggaagg

SEQ ID NO: 680 - DNA, 176 bp, Homo sapiens
cctaggattgtgggggcaatgaatgaagcgaacagattttcgttcattttggttctcagggtttgttataattttttatttttatgggctttggtgagggaggtaagtggtagtttgtgtttaatatttttagttgggtgatgaggaatagtgtaaggagtatgggggtaattatg

SEQ ID NO: 681 - DNA, 152 bp, Homo sapiens
ctggagatggatatgagactagtcaagatgtgaatgctaattggagagaaatataattttaggaagatgcacattgatgtggggttttgatgtgtctgattttgactactcaagctctgtttacagaagaaaattgaatggcgagggtgtgg

SEQ ID NO: 682 - DNA, 141 bp, Homo sapiens
ccagtgcttgcttgccgtggtttagtgattgggtgttagaaataaaaactcaggtctatttcttaccagtcagtaacaatttttagagaatgtacttggtatataatatatggacttcaggaactttgttggggtgggggg

SEQ ID NO: 683 - DNA, 308 bp, Homo sapiens
ccagcaatggtacagagtgagggtgttctgctaatgacttcagagaagtatttaagaaaaacatagaaaaacgtgtgcggagtttgccagaaatagatggcttgagcaaagagacagtgttgagctcatggatagccaaatatgatgccatttacagaggtgaagaggacttgtgcaaacagccaaatagaatggccctaagtgcagtgtctgaacttattctgagcaaggaacaactctatgaaatgtttcagcagattctgggtatcaaaaaactagaacaccagctcctttataatgcatgtcag

SEQ ID NO: 684 - DNA, 277 bp, Homo sapiens
tggtattaggattaggatgtgtgaagtatagtacggatgagaaggttggggaacagctaaataggttgttgttgatttggttaaaaaatagtagggggatgatgctaataattaggctgtgggtggttgtgttgattcaaattatgtgttttttggagagtcatgtcagtggtagtaatataattgttgggacgattagttttagcattggagtaggtttaggttatgtacgtagtctaggccatatgtgttggagattgagactagtagggctagg

SEQ ID NO: 685 - DNA, 457 bp, Homo sapiens
  misc_feature 10: n = A,T,C or G
ctgtggcgtnccctacttctcccaaacctcgcaactccctcccaggacagtcagtgccaaagaaacaggtcgctgaaaactaaaatgtccacatccctaactggcaacccacatcaaccccaaaaggttgaagaatcatctaagatatttcagatgctctatgaagaaattcactttaacacttataactgtaagactttgcatacattacaacagtgcattagtgatacaagttgtaaaatacgtttccattcctttggattttgcatatgatggttttgcatcagtcactgcaggtagattgagcaagctttttgtgtttgtttttttaaacatgcattcaactagatatgattcagaatagattaatactccctttttatcactacagttagctaaaaaattgccaggcagtccacaaaacagaatttgctttaagaccaacccacagagtcag

SEQ ID NO: 686 - DNA, 234 bp, Homo sapiens
  misc_feature 1: n = A,T,C or G
ntggatttataaaatagttgcaatgacaaaagaagtatgttttgacagtaaaaaaaagacattatggacaaaatatgcaaaatgtgcaaagaaaaaataaatttgcattagaaaggtgggcatttgatctctgagccctgtgccatgtaacattgccatgttctttcactgttgtttgaatgttgtaccccagcccttgactctggacttaaggcaagctatgactggctttgg

SEQ ID NO: 687 - DNA, 315 bp, Homo sapiens
  misc_feature 1, 2, 190: n = A,T,C or G
nngtctgtgaaaaactctttggatgattctgccaaaaaggtacttctggaaaaatacaaatatgtggagaattttggtctaattgatggtcgcctcaccatctgtacaatctcctgtttctttgccatagtggctttgatttgggattatatgcacccctttccagagtccaaacccgttttggctttgngtgtcatatcctattttgtgatgatggggattctgaccatttatacctcatataaggagaagagcatctttctcgtggcccacaggaaagatcctacaggaatggatcctgatgatatttggcag

SEQ ID NO: 688 - DNA, 522 bp, Homo sapiens
  misc_feature 31, 32, 387: n = A,T,C or G
ctgaattagaggaggagaaaagaagccattnnggagtactttaattgtttagatgtgagaggctgaatgtttgggttaagatgttagttgtcagaatcatgagaaaaggttttaagcaaggggcatttctaattctaaaaataacaactactgttatttattgagcactatctttttgttgggtactgtctaaagtacttgatttattttttaaaaccttacaaaaaacttacaaggtaggtactgaaagattcagtaatttgttcaaagtcacacagcaaataagcaacagactctggatttgaaccaggcaatcctagagcctgtactgttagtaattatactttagcacctgtcaagaattcctgttgagtgtcaagaagcaancaccaagttaggatttaaagcaaacatgattgaagaatactgtggtgtggttgacagtagtgcctaagtctgttttcagagtgaaaaatgacaaattagattttaagtatggtttggagataatatcaggacagt

SEQ ID NO: 689 - DNA, 158 bp, Homo sapiens
  misc_feature 11, 13, 15, 34, 51: n = A,T,C or G
tctcaacttantntnatacccacacccacccaanaacagggtttgttaggnattgtttgcattaataaattaaagctccatagggtcttctcgtcttgctgtgtcatgcccgcctcttcacgggcaggtcaatttcactggttaaaagtaagagacag

SEQ ID NO: 690 - DNA, 300 bp, Homo sapiens
  misc_feature 33, 261: n = A,T,C or G
tagaactcgtatttttaaacttctattctctanccttttccactacattatgacacaagaccctgcagaaagtcgtctggaaaatatcagaccatctcttacttgtcccatccaatcttacatcgaattatatgcacccttaaaaagttatttggagttttaaaaaactctattagcccaaattacctgaaataaactcctggcttgttcccctaatgtttataaaaaattgattgaaaatattcattttaaaaatgaagntcttgaatttatttaaattactgtcttgcagtgagttgg

SEQ ID NO: 691 - DNA, 305 bp, Homo sapiens
ctgttcagaaagctcattggacctggttttgaaaataaaacaaagttaaaaccctgggaggagttattgtgcagtgtggagtactcaggctttcttataaagaaaaaaaaagttatctggtaccaaagtgtgcaacctacagaccctcaggtactgccctgtgacttctctgtatgacatcacaaggctgccaagtgcctgtttttctagaactaggagttggtgaggtttggctagtgctgaaaccatgcataggattggtttactaaattaaaaccttattacgtacgtcctccaaaagacag

SEQ ID NO: 692 - DNA, 582 bp, Homo sapiens
caggaaatggataaccattttaactgtattttttgcagcccgtaccttcttgggaatacaattgtctaactttttatttttggtctggctgttgtggtgtgcaaaactccgtacattgctattttgccacactgcaacaccttacagatgtggaagatgtgaaatttgtcatcaattatgactaccctaactcctcagaggattatattcatcgaattggaagaactgctcgcagtaccaaaacaggcacagcatacactttctttacacctaataacataaagcaggtgagcgaccttatctctgtgcttcgtgaagctaatcaagcaattaatcccaagttgcttcagttggtcgaagacagaggtgcaggtaaggatgactgataggaaatgttggtagttacgagtcacatcgttgtctacaaatccatttaaatggtattggagggtgagtaaaaccttgaatgtgaaaacttaagctgaaaaattgtaaaaacatttcacgcctaccatgaatagatctgtttctttctgtccacaatgatttgtgtcatagacataattgatcaatttgcaattg

SEQ ID NO: 693 - DNA, 275 bp, Homo sapiens
ccaattgatttgatggtaagggagggatcgttgacctcgtctgttatgtaaaggatgcgtagggatgggagggcgatgaggactaggatgatggcgggcaggatagttcagacggtttctatttcctgagcgtctgagatgttagtattagttagttttgttgtgagtgttaggaaaagggcatacaggactaggaagcagataaggaaaatgactatgagggcgtgatcatgaaaggtgataagctcttctatgataggggaagtagcgtcttg

SEQ ID NO: 694 - DNA, 397 bp, Homo sapiens
  misc_feature 1: n = A,T,C or G
nggtctgcatttttattgcgatctgcagatgaactggaaaatctcattttacaacagaactgagacagacgaccaccatattcactgaggtctaaatttgcagtttccactaatgacattttgatttcccaacagagatacttctggtcttactgcacagtcttttaagagaaatacttccattatgccacattgtccttgatccgtaagtgatgtgttaaggtgcttcaaaggaactctgacctctgaagtacttgagctactttagtatgtccagcctattgctttttgttttagtgtgtcaccataaatatcaggggcataaaaggctatctattcttaattcaaggataaaacagaagaagcttgtggtataaaacaatagttcaagatccag

SEQ ID NO: 695 - DNA, 609 bp, Homo sapiens
  misc_feature 29, 96, 165, 236, 248, 312, 314, 334, 352, 359, 413, 414,472, 525, 547, 583, 609: n = A,T,C or G
ctgagcttccatttgtcagctagcactgnggtagtcaaccatgcgaatgaggctattttggacctcatgattgtccagtgcctgggctgataccgngggaaacgaaattttgtggctgcccacaaaatcatggaaaataatgattttttagaaaacctccactgntttgttgtgcagcaataaataactgaaacaccaatccaaaaaacttataaagctataacaattaaaacagnataataatagtnccgggatacaaaaatggtcaaattgaagaggatacaaagcctcaaagcagtcctcactcataananccttgttgtatcactaaaanggcattaaaattgagaanaaggaanaactagtggattaattaataaatgagaagtatccataaggaaaaattaaaattnnattcttgcttcacattatgaaaaaatacaaacaacagattgattaaagacttaaatgngatcaacaaaatgttaaaactgtgataagaacatttaagaaaatagttctatnaccctgggataaaacattttcntccaaggcattaaagtgttaaatgaaaagactgatncatttattcattagaatttaaattcn

SEQ ID NO: 696 - DNA, 300 bp, Homo sapiens
ctgcaaaataagcgtgctaaattaaattgtcttaaggtttttccacttcattttgtgactttgtgtggttcgaatttctcagtattttaaccagtgtgttgatgttaaagtcaaaggctgcagtatgtctatattcttgctgtactcattggtagtttcagtatatgtaatgtgagtttaaatagtgaaattgtatctcatattaacatttcaaatgctcatattgaaaatggaaaatagtaaacacgggaattgattttattctggttgtctataatacttcattttaaatgtaaatgg

SEQ ID NO: 697 - DNA, 391 bp, Homo sapiens
  misc_feature 1, 2, 10, 16, 23, 315, 350: n = A,T,C or G
nngtcatgtntgatgnatctgancaggttgctccacaggtagctctaggagggctggcaacttagaggtggggagcagagaattctcttatccaacatcaacatcttggtcagatttgaactcttcaatctcttgcactcaaagcttgttaagatagttaagcgtgcataagttaacttccaatttacatactctgcttagaatttgggggaaaatttagaaatataattgacaggattattggaaatttgttataatgaatgaaacattttgtcatataagattcatatttacttcttatacatttgataaagnaaggcatggttgtggttaatctggtttatttttgntccacaagttaaataaatcataaaacttgaacaaaaaaaaa

SEQ ID NO: 698 - DNA, 536 bp, Homo sapiens
  misc_feature 508, 523: n = A,T,C or G
ctgagcatacagcaataaaaataacataatttttatgtgtacaatatttatggaatacgttactggaacagataaataatttagttaataacatgacaaagaacagaaattgtatacactatacagcatagtaatagaataatgaatgattaaagttattaatattaggtagaaaatgaagggtatctttgagagcagaactcaaggaagcaagcaatttgccttatgaggaaagagttacctgtggataaaggagaaactgaaaaatttacaagtcaagactttttgagcaaagacaaaaatatgactatgagtcaccaattcagtacagtgaaaaaaaagttgaagagatatcttggaagtaaaccatgttgtggaagagcagggttttgataatcatgggattattctgaatgaattttaaatgcgataggaatatatgagataatttcaccagagaataatatgatcatgtttgcatttcaaaggggtgtatctggtgcactgngtagaataaataggntatgtgagcaagt

SEQ ID NO: 699 - DNA, 419 bp, Homo sapiens
  misc_feature 1: n = A,T,C or G
ngtccacctgagggcaggtgacaaggacctgacagagcccatgcagggctttagatttggacacacaagagttgataacttcctcatgaactccttgcctgatctaaactcatattatgggttctgactgtttgagtaatcatcttcaaggttaaacctcttggcagttacccttttcacaaagtgcacagtgggaatcgagaatcgatagggttaattttggagcagtggcttataccattcacctctgtttttttgtgattatttcacagataatgagaccttaataacaaataggcgtaaaaaaattttcacattgaaatgatagaaacatttgatgtaataaaacttggttggcttgatattttaaggaattgaaacctagcaatcttattggagagacaagaattggtctccag

SEQ ID NO: 700 - DNA, 336 bp, Homo sapiens
ccacttattgtccttaaaaatccatactgatacatggacagtaagtgtgttttcagatggagtaccagcaccgaaaatgggttgagggaggatgggttgtatgtatgtttctgcccactaattttgagcagccatattatgaattaaatcgtcacagccaagtaataacccaagaatggtatgagtttcatgtgtaatagctcaaatggaataagcatgaatgctggagtggaccattatcctcaaatattctatgtcacttctcatttaaagactcttgttatgaactattagaaactttaggcaaaatcaaaagtatttgcggcaaaataaagg

SEQ ID NO: 701 - DNA, 418 bp, Homo sapiens
ccatgtgatgatgttgacaacccctgaagagcctcagtccattgttccacgtttaagaactaggaataccaggactgatgcaattctactgggtcactatcgcttgtcacaagacacagacaatcagaccaaagtatttgctgtaataactaagaaaaaagaagaaaaaccacttgactataaatacagatattttcgtcgtgtccctgtacaagaagcagatcagagttttcatgtggggctacagctatgttccagtggtcaccagaggttcaacaaactcatctggatacatcattcttgtcacattacttacaaatcaactggtgagactgcagtcagtgcttttgagattgacaagatgtacacccccttgttcttcgccagagtaaggagctacacagctttctcagaaagg

SEQ ID NO: 702 - DNA, 261 bp, Homo sapiens
  misc_feature 104, 178, 184, 240: n = A,T,C or G
gggcctgttgtgggggtgggggaagcagggaggggaacagctaaataggttgctgttgatttggttaaaaaatagtagggggatgatgctaataattaggctgngggtggttgtgttgattcaaattatgtgttttttggagagtcatgtcagtggtagaaatataattgttgggacnattagntttagcattggagtaggtttaggttatgtacgtagtctaggccatatgtgttgganattgagactagtagggctagg

SEQ ID NO: 703 - DNA, 261 bp, Homo sapiens
  misc_feature 40, 104, 178, 184, 220, 246: n = A,T,C or G
gggcctgttgtgggggtgggggaagcagggaggggaacanctaaataggttgctgttgatttggttaaaaaatagtagggggatgatgctaataattaggctgngggtggttgtgttgattcaaattatgtgttttttggagagtcatgtcagtggtagtaatataattgttgggacnattagntttagcattggagtaggtttaggttatgtacgtagnctaggccatatgtgttggagattganactagtagggctagg

SEQ ID NO: 704 - DNA, 381 bp, Homo sapiens
  misc_feature 1, 4: n = A,T,C or G
ngtntgaattctattaaagatacaaagaggagctggtaccatttcttctgaaactattacaaacaactgaaaaggtggaatttctccctaattcattttaggaggccagcattatactgataccaaaacctggcagaggtacaataataaaaggaaacttcaagtcagtatcactgatgaacaccaatgtgaaaatcctcaataaaatactggcaaactgaattcagcagcacatcaaaaagctaatccaccacaatcaagtcagcttcatccctgcgatgcaagtctggttcaacatatgcaaatcaataaatacaattcatcagataaacagagctaaagacaaaattcacatgattttctcaatagatgcagaaaagg

SEQ ID NO: 705 - DNA, 477 bp, Homo sapiens
ctgaaccctcgtggagccattcatacaggtccctaattaaggaacaagtgattatgctacctttgcacggttagggtaccgcggccgttaaacatgtgtcactgggcaggcggtgcctctaatactggtgatgctagaggtgatgtttttggtaaacaggcggggtaagatttgccgagttccttttactttttttaacctttccttatgagcatgcctgtgttgggttgacagtgagggtaataatgacttgttggtgattgtagatattgggctgttaattgtcagttcagtgttttaatctgacgcaggcttatgcggaggagaatgttttcatgttacttatactaacattagttcttctatagggtgatagattggtccaattgggtgtgaggagttcagttatatgtttgggattttttaggtagtgggtgttgagcttgaacgctttcttaattggtggctgcttttagg

SEQ ID NO: 706 - DNA, 266 bp, Homo sapiens
  misc_feature 100, 115, 157: n = A,T,C or G
ccatggctaggtttatagatagttgggtggttggtgtaaatgagtgaggcaggagtccgaggaggttagttgtggcaataaaaatgattaaggatactantataagagatcaggntcgtcctttagtgttgtgtatggctatcatttgttttgaggntagtttgattagtcattgttgggtggtaattagtcggttgttgatgagatatttggaggtggggatcaatagagggggaaatagaatgatcagtactgcggcgggtagg

SEQ ID NO: 707 - DNA, 358 bp, Homo sapiens
  misc_feature 131: n = A,T,C or G
ccatcagagaaatgcaaatcaaaaccacaatgagataccatctcacaccagttagaatggcaatcattaaaaagtcaggaaacaacaggtgctggagaggatgtggagaaataggaacacttttacaccgntggtgggactgtaaactagttcaaccattgtggaagtcagtgtggcgattcctcaaggatctagaactagaaataccatttgacccagccggccaatattcaacattcttaaaggaaagaattttcaacccagaatttcatatccagccaaactaagcttcgttagtgaaggagaaataaaatactttacagacaagcaaatactgagagattttgtcaccaccagg

SEQ ID NO: 708 - DNA, 491 bp, Homo sapiens
  misc_feature 12, 479: n = A,T,C or G
cctactatgggngttaaattttttactctctctacaaggttttttcctagtgtccaaagagctgttcctctttggactaacagttaaatttacaaggggatttagagggttctgtgggcaaatttaaagttgaactaagattctatcttggacaaccagctatcaccaggctcggtaggtttgtcgcctctacctataaatcttcccactattttgctacatagacgggtgtgctcttttagctgttcttaggtagctcgtctggtttcgggggtcttagctttggctctccttgcaaagttatttctagttaattcattatgcagaaggtataggggttagtccttgctatattatgcttggttataatttttcatctttcccttgcggtactatatctattgcgccaggtttcaatttctatcgcctatactttatttgggtaaatggtttggctaaggttgtctggtagtaagggnggagtgggtttg

SEQ ID NO: 709 - DNA, 460 bp, Homo sapiens
  misc_feature 1, 197, 216, 231, 313, 389, 411: n = A,T,C or G
nggttttttttgtagagcaaataatttatgcaaaatatgttacaaaatctgggatgctaaatagttgacacaagtactgtgtttgacatttagtttcatttgaattagtaatagaatttgctccttccaacatttacatcttttttctttctgactttatatattttcaataaaaatttgctccacagtttttaagntcattcttcttgaatccgnttttacatttgctgngacaaacctgcataaaactagattttatagatataacttctttggaagagataaaaattcaaaagtttgacattgctttcanttattcttttcttcattgttttgattggcccctgttagattgatgtattgccaatctacttttgatggcatgaatntaaaatgacaacataaaaagcncttctagtgcaacagtaattgaaacttgcagttttccattaaaaaaaaa

SEQ ID NO: 710 - DNA, 542 bp, Homo sapiens
  misc_feature 275, 507: n = A,T,C or G
ctgttacagtgacaagagataaaaagatagacctgcagaaaaaacaaactcaaagaaatgtgttcagatgtaatgtaattggagtgaaaaactgtgggaaaagtggagttcttcaggctcttcttggaagaaacttaatgaggcagaagaaaattcgtgaagatcatagatcctactatgcgattaacactgtttatgtatatggacaagagaaatacttgttgttgcatgatatctcagaatcggaatttctaactgaagctgaaatcatttgngatgttgtatgcctggtatataatgtcagcaatcccaaatcctttgaatactgtgccaggatttttaagcaacactttatggacagcagaataccttgcttaatcgtagctgcaaagtcagacctgcatgaagttaaacaagaatacagtatttcacctactgatttctgcaggaaacacaaaatgcctccaccacaagccttcacttgcaatactgctgatgcccccagtnaggatatctttgttaaattgacaacaatggacctg

SEQ ID NO: 711 - DNA, 394 bp, Homo sapiens
  misc_feature 184, 299: n = A,T,C or G
caaacccactccaccttactaccagacaaccttagccaaaccatttacccaaataaagtataggcgatagaaattgaaacctggcgcaatagatatagtaccgcaagggaaagatgaaaaattataaccaagcataatatagcaaggactaacccctataccttctgcataatgaattaactanaaataactttgcaaggagagccaaagctaagacccccgaaaccagacgagctacctaagaacagctaaaagagcacacccgtctatgtagcaaaatagtgggaagatttataggnagaggcgacaaacctaccgagcctggtgatagctggttgtccaagatagaatcttagttcaactttaaatttgcccacagaaccctctaaatccc

SEQ ID NO: 712 - DNA, 552 bp, Homo sapiens
  misc_feature 11, 133, 329, 345, 421, 518: n = A,T,C or G
gaggtctgtanaatgccaggctcaaatttgtctttataatttaataccagaaatctttcccttgtgatgtttctttctttctggattgcctctatagcaggggatagcgggggaggataaggcacatctttgntgtactgagaaatttgaccacgcaggatgatgtggctgttctcattcatctgcacagagaaaaataatgataaaatatccctttcctatgtttactgattttatggctgccataatggaagcctccttgactatttaatcctttctgtcaactaggttcgattttttttttaatttacctgttagaggtatttaanaattttaactagctanaaataattacattccaaaggaacaccaaggcaaataaatggttggtaatcagcaaaagaattacattagttgttgntgctacttattagggggagaactgtttttttttaaatttaaacaatttaataatctcaactgcaaataattttagatgcagcaaaggactatgtagncgttaatacctcatgttgatattttcataatatt

SEQ ID NO: 713 - DNA, 518 bp, Homo sapiens
  misc_feature 133, 148, 188, 209, 246, 248, 263, 306, 316, 339, 371, 430,469: n = A,T,C or G
ccaaaaactggaagcagctcactaaacaaacagtggcatacccatagaactgcatacttctcagcagtatgaaagaatgagctacttatataagcatcattgataaacctcaaaaaaaaaatgccacatgaanaaacccaaagggganaaacataaaaactttatatgtcagtcatataaaattctanaaaatgcaaactaatccatcntaaaggaaagtaaatcaacagttgtctggaggaccananagagcaggaggaganagattattaaaggggttaaagtaaatttgggagtgcccttccntttttaaatnctatgaaaatgaaagtaaaggcncatgcatgttgtaaactaatagtaacaaacanaatgggttggagtggggtgttgtctggggacatcattacaaaatgtaagccagtttatntaaattttgaaaagaccgtggactctgatctgactgatnaatgttggaagagataagtgtgctgcaaatgggggaattaataaaacag

SEQ ID NO: 714 - DNA, 281 bp, Homo sapiens
ccaattgatttgatggtaagggagggatcgttgacctcgtctgttatgtaaaggatgcgtagggatgggagggcgatgaggactaggatgatggcgggcaggatagttcagacggtttctatttcctgagcgtctgagatgttagtattagttagttttgttgtgagtgttaggaaaagggcatacaggactaggaagcagataaggaaaatgactatgagggcgtgatcatgaaaggtgataagctcttctatgataggggaagtagcgtcttgtagacc

SEQ ID NO: 715 - DNA, 443 bp, Homo sapiens
cttgaaatcagcaacacacttacaaatgagaaaatgaaaatagaagagtatataaagaaagggaaagaggattatgaagagagtcatcagagagctgtggctgcagaggtatccgtacttgaaaactggaaggagagtgaagtgtataagctacagatcatggagtcacaagcagaagcctttctgaagaagctggggctgattagccgtgatcctgcagcatatcccgacatggagtctgatatacgttcatgggaattgtttctttctaatgttacaaaagaaattgagaaagcaaagtctcagtttgaagaacaaattaaggcaattaaaaatggttcccggctcagtgaactttctaaagtgcagatttctgagctttcatttcctgcctgtaacacggttcatcccgagttactccctgagtcttcaggccacgatgg

SEQ ID NO: 716 - DNA, 639 bp, Homo sapiens
  misc_feature 6, 516, 532, 553, 602, 617, 620: n = A,T,C or G
ccaaanaaaatgaagtacagagtctgcatagtaagcttacagataccttggtatcaaaacaacagttggagcaaagactaatgcagttaatggaatcagagcagaaaagggtgaacaaagaagagtctctacaaatgcaggttcaggatattttggagcagaatgaggctttgaaagctcaaattcagcagttccattcccagatagcagcccagacctccgcttcagttctagcagaagaattacataaagtgattgcagaaaaggataagcagataaaacagactgaagattctttagcaagtgaacgtgatcgtttaacaagtaaagaagaggaacttaaggatatacagaatatgaatttcttattaaaagctgaagtgcagaaattacaggccctggcaaatgagcaggctgctgctgcacatgaattggagaagatgcaacaaagtgtttatgttaaagatgataaaataagattgctggaagagcaactacaacatgaaatttcaaacnaaatggaagaatttangattctaaatgaccaaaacanagcattaaaatcagaagttcagaagctgcagactcttgtttctgcacangcctaataaggatgntgnggaacaaatggaaaaattg

SEQ ID NO: 717 - DNA, 473 bp, Homo sapiens
  misc_feature 1, 2, 102, 148, 157, 187, 290: n = A,T,C or G
nntgaggctactgctgttttattacaacattacctcttgtttttataaagtgtaccaagatttaaattgataactttattttacttgaaaaaaaaaagtttnttttatcaccagtgttacagttgtcttctgtttctttttgttttgntttatttgntttcctttttagccaaagagtgaacagaanattttcttattttggtggctattcattttacttttaaaagtgattggtggattttagactaattatgggggaatttgccaccaaaataaaaaatatgtaaagngtagtgattacagagtggttaaaatgtgggttagtacttatttattccattaattgattatttgactgtttataaagaaagttgctttatttctttaaacatcttcaaaagatgatcctttcttgtcacattatagccaaaagaagcagagaacttcactgtctgcatttggttcctggttgg

SEQ ID NO: 718 - DNA, 207 bp, Homo sapiens
ggtaaatgctagtataatatttaccatctcacttctaggaatactagtatatcgctcacacctcatatcctccctactatgcctagaaggaataatactatcactgttcattatagctactctcataaccctcaacacccactccctcttagccaatattgtgcctattgccatactagtctttgccgcctgcgaagcagcggtagg

SEQ ID NO: 719 - DNA, 255 bp, Homo sapiens
  misc_feature 214: n = A,T,C or G
cctatattacggatcatttctctactcagaaacctgaaacatcggcattatcctcctgcttgcaactatagcaacagccttcataggctatgtcctcccgtgaggccaaatatcattctgaggggccacagtaattacaaacttactatccgccatcccatacattgggacagacctagttcaatgaatctgaggaggctactcagtagacagncccaccctcacacgattctttacctttcacttcatcttgcc

SEQ ID NO: 720 - DNA, 455 bp, Homo sapiens
  misc_feature 154, 346, 349, 366, 444: n = A,T,C or G
ccaatgtcgaaacctacaagatttccttaaaatctctaatagaggcattacttgctttcaattgacaaatgatgccctctgactagtagatttctatgatccttttttgtcattttatgaatatcattgattttataattggtgctatttgaanaaaaaaatgtacatttattcatagatagataagtatcaggtctgaccccagtggaaaacaaagccaaacaaaactgaaccacaaaaaaaaaggctggtgttcaccaaaaccaaacttgttcatttagataatttgaaaaagctccatagaaaaggcgtgcagtactaagggaacaatccatgtgattaatgnttncattatgttcatgtaanaagccccttatttttagccataattttgcatactgaaaatccaataatcagaaaagtaattttgccacattatttatnaaaaatgttcc

SEQ ID NO: 721 - DNA, 530 bp, Homo sapiens
  misc_feature 134, 390: n = A,T,C or G
ccagtgcttgctgccgtggtttagtgattgggtgttagaaataaaaactcaggtctatttcttaccagtcagtaacaatttttagagaatgtacttggtatataatatatggacttcaggaactttattggggnggggggttaattttgccttaccctgttcactttcagatgattaggcttttgcactttagaatgagaaacttgtgacgttagtgtgttcttactagctttaatttgtatgtagcaatgaattgtgaatcttagtgcagtgggtttttttaaaaaactcaaaaagctgggaattaagtggtttcagtaataatgctataccgaggtgcttgcattgtatttcataattttgttacaaaccaaaattatttttaatganaacggtcttgggttcagaggtgtgatgccagaatgtattttcgtactgttaggcccttggaacagataccggtgctttcttgaaagatgaaagaaatgcaatgggtgctcttcatgcaaggttgcaaacctaccaagaat

SEQ ID NO: 722 - DNA, 242 bp, Homo sapiens
  misc_feature 29, 35, 55, 192: n = A,T,C or G
ccaagggtcatgatggcaggagtaatcanaggtgntcttgtgttgtgataagggnggagaggttaaaggagccacttattagtaatgttgatagtagaatgatggctagggtgacttcatatgagattgtttgggctactgctcgcagtgcgccgatcagggcgtagtttgagtttgatgctcatcctgatnagaggattgagtaaacggctaggctagaggtggctagaataaataggagg

SEQ ID NO: 723 - DNA, 472 bp, Homo sapiens
  misc_feature 191, 266, 460: n = A,T,C or G
cctactatgggtgttaaattttttactctctctacaaggttttttcctagtgtccaaagagccgttcctctttggactaacagttaaatttacaaggggatttagagggttctgtgggcaaatttaaagttgaactaagattctatcttggacaaccagctatcaccaggctcggtaggtttgtcgcctcnacctataaatcttcccactattttgctacatagacgggtgtgctcttttagctgttcttaggtagctcgtctggnttcgggggtcttagctttggctctccttgcaaagttatttctagttaattcattatgcagaaggtataggggttagtccttgctatattatgcttggttataatttttcatctttcccttgcggtactatatctattgcgccaggtttcaatttctatcgcctatactttatttgggtaaatggtttggctaangttgtctggtag

SEQ ID NO: 724 - DNA, 292 bp, Homo sapiens
  misc_feature 1, 26, 73, 177, 215, 256, 274, 276: n = A,T,C or G
nccaccactgcagccctacatacagntgaaaaaaaattccattctgttaacatttgttttataagttttcacncaatacacaaaaaacccctctgcacttcttgtaaagaacaaaaaagatacacaacagttaagcgtaaagatcacaggcaatagcattcaaacatggatgtgggnagagaaaggagtacctggcatgagtacctgcttagttngactgaatccttgatttttaatttggcttttcatgggccgntcacaacaccaacgctgngngaggtatggtagtcag

SEQ ID NO: 725 - DNA, 122 bp, Homo sapiens
  misc_feature 35, 61, 86, 88, 91, 114: n = A,T,C or G
atagaaagggcatacccaaaatgttactgaaaatntaatacaaattccaagattcaccaangaagtaacaaaaacctggcctgcangnggncccctatcccgtggctccatggntgatgtgg

SEQ ID NO: 726 - DNA, 477 bp, Homo sapiens
  misc_feature 266: n = A,T,C or G
ctgaaccctcgtggagccattcatacaggtccctaattaaggaacaagtgattatgctacctttgcacggttagggtaccgcggccgttaaacatgtgtcactgggcaggcggtgcctctaatactggtgatgctagaggtgatgtttttggtaaacaggcggggtaagatttgccgagttccttttactttttttaacctttccttatgagcatgcctgtgttgggttgacagtgagggtaataatgacttgttggtgattgtanatattgggctgttaattgtcagttcagtgttttaatctgacgcaggcttatgcggaggagaatgttttcatgttacttatactaacattagttcttctatagggtgatagattggtccaattgggtgtgaggagttcagttatatgtttgggattttttaggtagtgggtgttgagcttgaacgctttcttaattggcggctgcttttagg

SEQ ID NO: 727 - DNA, 416 bp, Homo sapiens
cctgtctttgaatggatgaaataggttaataaaaaacatcactgtttaaaaactagaacactgaaaaattctaggaaagcttattttcccttatatttttatggtactttcaacacttaataacactatttcaattaagttttctcctagagtttatagtatatcagtacattcttttctgtggatgcaataatatagaatcttattccaaatcttactggcaggttctcttaaattcttcaacggctgccatagtgattaaccaaaattagttatgatttctgcctatctgtgtgagaacttacaggggaaattgttctaaacctgaggaacatgaagtaactgtactgcacactccaaatgatgacagtcattttatatcaccttcaattacccaacagcttttaatagtctgg

SEQ ID NO: 728 - DNA, 416 bp, Homo sapiens
  misc_feature 411: n = A,T,C or G
cctgtctttgaatggatgaaataggttaataaaaaacatcactgtttaaaaactagaacactgaaaaattctaggaaagcttattttcccttatatttttatggtactttcaacacttaataacactatttcaattaagttttctcctagagtttatagtatatcagtacattcttttctgtggatgcaataatatagaatcttattccaaatcttactggcaggttctcttaaattcttcaacggctgccatagtgattaaccaaaattagttatgatttctgcctatctgtgtgagaacttacaggggaaattgttctaaacctgaggaacatgaagtaactgtactgcacactccaaatgatgacagtcattttatatcaccttcaattacccaacagcttttaatantctgg

SEQ ID NO: 729 - DNA, 564 bp, Homo sapiens
  misc_feature 399, 439, 463: n = A,T,C or G
ctgtgagtagaggagtcttcccgagagtagcagttgttgatccaaatgattgaagccttcaggtaagggaataactgctgcaggaattctttcttgaagaatttaagctgtttggtaagaattctgtaactacatacctttgaaacactattcacattcaaataaacgcttgttttctagccaggcacaggctcaattagtttttcaaactctagccaaggcagtatttcatttgggaaatcatgcaacagaactgctcaattcttaacttctcctgctgttaacatttacacttagactgccagcaacagttaacttaaattttggtctcaagggaacaaaaaaaaattgcattcagaatttaatatagtattttaaaactaattttagcctgtaagncattatgagcaatagtaacttttatacctcctcatcttgnctgataatatattctatatgctgncaatctgattatatagtctatatgctagaagttgctgattttcattctgccaccaaaaaaaactgtccttttttttttatgggggaaaaagggaatttaaa

SEQ ID NO: 730 - DNA, 310 bp, Homo sapiens
ccatttttatttcttcttcagagaagtgtttatttaggtctgttgcccattttacaattaggccatatgttttcttgctgttgagttgtatgtgtgtttgtataaattttgcatattaaccccttatcacacgtatgttttttaaaataaattttgcttattaatcttttatcagatgtatggtttccaaatatattcttccgatccatggattctcttttttgttatgattgtttctttgctcttcggaagctttttgttttgttttgttatttgttttactttgatatagtcccatttattgtttttg

SEQ ID NO: 731 - DNA, 467 bp, Homo sapiens
  misc_feature 1, 260, 276, 334, 388, 392, 407: n = A,T,C or G
ngacaaccttagccaaaccatttacccaaataaagtataggcgatagaaattgaaacctggcgcaatagatatagtaccgcaagggaaagatgaaaaattataaccaagcataataaagcaaggactaacccctataccttctgcataatgaattaactagaaataactttgcaaggagagccaaagctaagacccccgaaaccagacgagctacctaagaacagctaaaagagcacacccgtctatgtagcaaaatagngggaagatttataggnagaggcgacaaacctaccgagcctggtgatagctggttgtccaagatagaatcttagntcaactttaaatttgcccacagaaccctctaaatccccttgtaaatttaactgntagnccaaagaggaacagntctttggacactaggaaaaaaccttgtagagagagtaaaaaatttaacacccatagtagg

SEQ ID NO: 732 - DNA, 492 bp, Homo sapiens
  misc_feature 266, 343, 364, 483: n = A,T,C or G
cctactatgggtgttaaattttttactctctctacaaggttttttcctagtgtccaaagagctgttcctctttggactaacagctaaatttacaaggggatttagagggttctgtgggcaaatttaaagttgaactaagattctatcttggacaaccagctatcaccaggctcggtaggtttgtcgcctctacctataaatcttcccactattttgctacatagacgggtgtgctcttttagctgttcttaggtagctcgtctggnttcgggggtcttagctttggctctccttgcaaagttatttctagttaattcattatgcagaaggtataggggttagnccttgctatattatgcttggntataatttttcatctttcccttgcggtactatatctattgcgccaggtttcaatttctatcgcctatactttatttgggtaaatggtttggctaaggttgtctggtagtgaggcggagngggtttggg

SEQ ID NO: 733 - DNA, 562 bp, Homo sapiens
  misc_feature 1, 169, 400, 430, 460, 497, 513, 523, 555: n = A,T,C or G
ntgaaatggcaatagcattcactgtcgtattttgcagtgctcaggaagtgggacgttaactttgaaggtgcttgtttgtattagctctgctaggtttacctctacaacgtagatttcagcagctatgctgactgacactacattctagttcttaagattttttttccanatccccccttccccagctagacatacgtagcatactttcatcttattcagtctttctgtaacctgctgctgcttttagtcctcctcacctcagatcggaatcaatggagtgggcccagaggatacattttaattccagtaatggtaggtagatttgtcctgctttctaaaacatctcctcatttcatatttccactccatattgattccataagggaaaattaatgggtgnttcctcctttagggaggcaatgcaaagagngtggacatcttctaatcttgaggaacagtngttgatttcccttgaaggagcttacatattgactgtntttcacaataacctgnttgccccagntcaatccctcattttaatacttaatgttggtnctgggct

SEQ ID NO: 734 - DNA, 265 bp, Homo sapiens
  misc_feature 1: n = A,T,C or G
nggtccagaacaagagaaataactgcagaaaacacatatggttggaaaccatgcgcttgtgactttttctgtagcctatgggagtggacagagtgggtaacccaagatgtttttaagactgactggactaagaatggcgtacttatagccaactacttcccccctaatgtgactgaagggattcataatgatcacaattagcattacggttaagtattttagggttgacgtctaagctcacacttgaaaggtatttatctaatgg

SEQ ID NO: 735 - DNA, 216 bp, Homo sapiens
atttaatacgtgctcactgctcggcacgcgctgaagctacagttaacaatcagtgagcacatattaaatgataaaataatgctgatggtaaacattcataacagcagagtaagattttggcagttttgtgtctcggtaacataactgtaaccttagatgaacacctatcccttcatgatctgactttagaggcaaggagtttgtaacatctaatgg

SEQ ID NO: 736 - DNA, 285 bp, Homo sapiens
  misc_feature 13, 177: n = A,T,C or G
ctgaaaggcaacntggagactagttagtctagtcccctcatattataaattggtatgctgaggccaggcagtaaattgctatggagctctccaatttaaggccagtttgactccaagggtagggcttctagtaaaattttgtgattaaattggaaactctaatttatttttctatgngtttttggtacctaatcctcataagcaagccatatttcaaggctgatcaatgaaaacaccaaataccaaagcttcctttcccttccaaatttactgaccctttgtcag

SEQ ID NO: 737 - DNA, 509 bp, Homo sapiens
  misc_feature 4, 13, 303, 347, 419, 446, 473, 483, 489, 503: n = A,T,C or G
agangaagaagangaagattaagggaaaagtacatcggtcaagaagagctcaacaaaacaaagcccatctggaccagaaatcccgacgatattactaatgaggagtacggagaattctataagagcttgaccaatgactgggaagatcacttggcagtgaagcatttttcagttgaaggacagttggaattcagagcccttctatttgtcccacgacgtgctccttttgatctgtttgaaaacagaaagaaaaagaacaacatcaaattgtatgtacgcagagttttcatcatggataactgngaggagctaatccctgaatatctgaacttcattagaggggtggnagactcggaggatctccctctaaacatatcccgtgagatgttgcaacaaagcaaaattttgaaagttatcangaagaatttgggtcaaaaaatgcttanaactctttactgaactggcggaagatnaagagaactncaaganattctatgagcagntctctt

SEQ ID NO: 738 - DNA, 97 bp, Homo sapiens
cagtgaattgaatacgactcctatagggcgaattgggccctctagatgcatgctcgagcggccgccagtgtgatggatatctgcagaattcgccctt

SEQ ID NO: 739 - DNA, 209 bp, Homo sapiens
  misc_feature 4: n = A,T,C or G
ccgncagtgtgatggatatctgcagaattcgcccttagcggcccgcccgggcagggtccttatatatagtagcttagtttgaaaaaatgtgaaggactttcgtaacggaagtaattcaagatcaagagtaattaccaacttaatgtttttgcattggactttgagttaagattattttttaaatcctgaggactagcattaattgacgg

SEQ ID NO: 740 - DNA, 164 bp, Homo sapiens
ccaagctaatgggtgacactgtgaatgcaactctaatgcagcctggcgtaaatggtcctatgggcactaactttcaagttaacacaaacagaggaggtggtgtgtgggaatctggtgcagcaaactcccagagtacatcatggggaagtggaaatggcgcaaat

SEQ ID NO: 741 - DNA, 514 bp, Homo sapiens
  misc_feature 82, 438, 485, 497: n = A,T,C or G
ccagtcagaattgagatgtgctgtgagtgcaaaatacactcaaatctaagacttagtatggaagaaaaagaagataaggtgnttcattaataatcttttatattgattacatgttgaaatgatatttttaatatactgggttacataaactgttattaagattaattttgcttgtttcttttttaatatggctactagaaaattaaaaattatgttgtggttcacattatatttctgttgaacaatgtggacatagataatctacagtcattacattagccttagaatttagcatcatacttttaagcactctggggtactaacttgaactcccagaaacccataagcacactctgcatataaattattgcaaaattcattcttatctctctgaaagatatgcattttaagggtaaaaagaattcacaaaatattgantccttaacaaatgtcaattagtatatggagagagctaaaggacttcntgtagactggtncattggggaaaaacaga

SEQ ID NO: 742 - DNA, 439 bp, Homo sapiens
  misc_feature 28, 123, 144, 347, 367: n = A,T,C or G
gcaggtcctatgcatagttaataagggntataatctactcaacatggaaaatgggagcctatttgcaaacacacgagtaattaaagtaccaattctctcttagtttctttttttatagttggnttattttgcaattataaatgntaaacatccctagagatgaaagttaaaatggctgatcacagatcagtagcaaaatacaaattgacaattcaaaattataaataaaactctgttgaggatgtttaactttgagcctccaaatttaagagctaagcttggaagaaacaaatttataggttatatttccctcttaaattaaaaaacaaacttcctctggcagtagnttgtgaattcctttcattgnaatgataccatgattacaggatcaaaaatgcttaacttacttgccattctgctcacatcatcacagttgttt

SEQ ID NO: 743 - DNA, 275 bp, Homo sapiens
  misc_feature 3: n = A,T,C or G
cangacgctacttcccctatcatagaagagcttatcacctttcatgatcacgccctcatagtcattttccttatctgctccctagtcctgtatgcccttttcctaacactcacaacaaaactaactaatactaacatctcagacgctcaggaaatagaaaccgtctgaactatcctgcccgccatcatcctagtcctcatcgccctcccatccctacgcatcctttacataacagacgaggtcaacgatccctcccttaccatcaaatcaattgg

SEQ ID NO: 744 - DNA, 295 bp, Homo sapiens
  misc_feature 5: n = A,T,C or G
ctgtncttttaaaaaatctggatgttttttatttagtgattgttcgacaattagctgcttcaaaacataatgtgcattgcttatgaatgccttcatatactaatacagatactctgataatattacactctaataaggataatgctgaattttgaaaggacacaaaacatctaatgccaatatatacatgattagccaacatctttgctatcaagaccactcgtttttaaataaagatgcaagtgtcagttgtagattattgggatgaagctaaatccccagaatgcagcagcag

SEQ ID NO: 745 - DNA, 477 bp, Homo sapiens
  misc_feature 434: n = A,T,C or G
cgcgttactgtacatattgctagcaggagacaactggaaatactaaacaaatactggaattcacattacagacagacgaaaccaacatggatgccacacataacttcctttgtagtttcacagagagcctatttgtggttgctcaggtggggtcatacattgcttgcagaaatggcctgatcatagctctatgaaacaatgaattcggaatgaaatcttaccatgacacctctctgtaggaaagaaatgttgcttcacgtgtgctaagttgagataataatatttcacatatttatatacagagaatcactctcaaatttaacccaagataagcaataggatttgggggtgacttgtacacatttctaacaacacttttcttttttctagaggtcactctcaaacactgatatatcactatagtttgagtgtanggattcagtaatcaaaggttgttattgcaaaagagccaggcag

SEQ ID NO: 746 - DNA, 524 bp, Homo sapiens
  misc_feature 393: n = A,T,C or G
ctgtgaaattgggttgggagagccaaaatactttacaacttcagaccggagaaaaggccagaggtgtgaagttagactctatgatgaaacagagtcgtcttttgcgatgacatgttgggataatgaatccattctacttgcacagagctggatgccacgagaaacagtaatatttgcctcagatgtaagaataaattttgacaaatttcggaactgcatgacagcaactgtaatctcaaaaaccattattacaactaatccagatataccagaagctaacattctgctgaattttatacgagaaaataaagaaacaaatgttctggatgatgaaattgacagttatttcaaagaatccataaatttaagtacaatagttgatgtctacacagntgaacaattaaagggaaaagctttgaagaatgaaggaaaagctgatccttcctatggcatcctttatgcctacatttccacactcaacattgatgatgaaactcaaaagtagttcgaaatagatgttccag

SEQ ID NO: 747 - DNA, 456 bp, Homo sapiens
  misc_feature 411: n = A,T,C or G
cctcagttcttgattgtggttgacggggcgtcaccatgaaggagcccatttagtataaagcttccaaccttttctcttaatcgtttctttaatcttttaaaccatcttcaagtgcataggggagtttccgatgccagaggatgaaagcaagtgctttctccaccctctcctcccagagtgaaaacaaatccttttgctgatacttgtttcaaaagcatccattgtaaagcttctcagtgacacaaaatactgagaggtaactttttatcaatcaaaccacataccccaatttaacacctttcagtgctctgaattcaactgacagactaaagggtgtttcctgtaacagtctgaaatattaagtgttttttttgttttgtttttaaatcttatttcagaaaacttcctctnggggtaggaaagtacacatgaagcagcaaagtaacgaagaaaaac

SEQ ID NO: 748 - DNA, 474 bp, Homo sapiens
  misc_feature 4, 28, 58, 207, 210, 217, 423: n = A,T,C or G
ccanaccagggaaccaaatgcagacagngaagttctctgcttcttttggctataatgngacaagaaagggatcatcttttgaagatgtttaaagaaataaagcaactttctttataaacagtcaaataatcaattaatggaataaataagtactaacccacattttaaccactctgtaatcactacactttacatattttttatttnggnggcaaantcccccataattagtctaaaatccaccaatcacttttaaaagtaaaatgaatagccaccaaaataagaaaatcttctgttcactctttggctaaaaaggaaaacaaataaaacaaaacaaaaagaaacagaagacaactgtaacactggtgataaaagaaactttttttttacaagtaaaataaagttatcaatttaaatcttggncactttataaaaacaagaggtaatgttgtaataaaacagcagtagcctcag

SEQ ID NO: 749 - DNA, 355 bp, Homo sapiens
  misc_feature 8, 9, 12, 22, 242, 311, 332, 348: n = A,T,C or G
cctgggtnnagnggctgactgnaacctccacttcctgttctcaggcaatcctcctgcctcagcctccttagtagctgggactacaggagtgtgcaaccatgcccaactaatttttgtatttttaatagagacagggtttcaccatgttgatcaggttggtctccaactcctgacctcaggtgatccacctgtcccagcctcccaaagtgctgggattacaggcatgagccaccacgcccggnccaggataaagtaaaaatttgtaagcacacaaggccctttgcaacctggctcctggttactactttaancctcctgccctcccaaatgtnctcactgtttttctanacatacc

SEQ ID NO: 750 - DNA, 493 bp, Homo sapiens
  misc_feature 350, 364, 454: n = A,T,C or G
ccatgctggtctcgaactcctgaactcaggtgatccacccgcctcagtctcccaatagattacatatattattaatgaattgcttcctttaacaccctattcattgaattttccagtaaaccacaattactaattactcctgaaatcagaaaagaggttaaaaagattttataacagtatcctatgaaatctactactttcaagtaatagtagttgaattaccaaaacccgtcactcaagccaatgactacaattaagatatgagtaacatttcctagataaataaagtcaattaattatatttgcatctgggaaatagagaaagtacatataagccatgattttgaagncaaaagagagagantatttgccaaggaggggtgagttatagtatgtaattataacatacagaagctttttgtatgctggtaactaattttaatttcctacattnttatggagatttctgctattcttgtcctattttccacct

SEQ ID NO: 751 - DNA, 364 bp, Homo sapiens
  misc_feature 11, 34, 211, 360, 362: n = A,T,C or G
cgaggtctggnaaggtcaccaagtctgcccaganagctcagaaggctaaatgaatattatccctaatacctgccaccccactcttaatcagtggtggaagaacggtctcagaactgtttgtttcaattggccatttaagtttagtagtaaaagactggttaatgataacaatgcatcgtaaaaccttcagaaggaaaggagaatgttttgnggaccactttggttttcttttttgcgtgtggcagttttaagttattagtttttaaaatcagtactttttaatggaaacaacttgaccaaaaatttgtcacagaattttgagacccattaaaaaagttaaatgagataaaaaaaaaaaancntg

SEQ ID NO: 752 - DNA, 498 bp, Homo sapiens
  misc_feature 17, 368, 395, 400, 425: n = A,T,C or G
ctggattatgggttggnattggtcatatgttagactccatacaggcatagctatgatgcagtgaatcccttagaagttacaattctcaaattacatacttcctcagatgtaacattagaactcaatatttctaacaataacataccagaaaaggctggactggcactcatctgctgactaacttgtagcctcagtaatatgacatacttgcctttaacaaattatctcaaattaactaacagaccttcagaaaatggagattctttttgatggggacataatcaaatttaagtctgagaaatatgcttaacagttggaactcaaattaaatgtactgattttaaagtttagacattaacaagtgatanattagcctcaaaaaaagacaatttggnaaggnttaggtcttttaatttggtgcttgntcacaacttgactggtgcttctttccttgctgcttcacatcaagcatggggccaattctattttcagtaaatg

SEQ ID NO: 753 - DNA, 467 bp, Homo sapiens
  misc_feature 1, 15, 77, 314, 317, 335, 419: n = A,T,C or G
nacaaccttagccanaaccatttacccaaataaagggataggcgatagaaattgaaacctggcgcaatagatatagnaccgcaagggaaagatgaaaaattataaccaagcataatatagcaaggactaacccctataccttctgcataatgaattaactagaaataactttgcaaggagagccaaagctaagacccccgaaaccagacgagctatctaagaacagctaaaagagcacacccgtctatgtagcaaaatagtgggaagatttataggtagaggcgacaaacctaccgagcctggtgatagctggntgnccaagatagaatcttagntcaactttaaatttgcccacagaaccctctaaatccccttgtaaatttaactgttagtccaaagaggaacagctcttggacacnaggaaaaaaccttgcagagagagtaaaaaatttaacacccatagtagg

SEQ ID NO: 754 - DNA, 196 bp, Homo sapiens
  misc_feature 17: n = A,T,C or G
gtcatgttcaagtgttntaatctgacgcaggcttatgcggaggagaatgttttcatgttacttatactaacattagttcttctatagggtgatagattggtccaattgggtgtgaggagttcagttatatgtttgggattttttaggcagtgggtgttgagcttgaacgctttcttaattggtggctgcttttagg

SEQ ID NO: 755 - DNA, 381 bp, Homo sapiens
ctggaaaggattctgtacatataagacatcaaatattgagggatactggaacttttaaattaatgggcaaagaaagtcaacaaaggaagttcatatgaaatcaaactagtaatatgattacaaaaaaaaagtttaaaatttttcttggccccagtcttatcatttctgagccaaatacaattctatcgaaatcacctgaaactgaaatcaccattctaggctggttttcccataaagatggactgctccaaaaagaggaatcaagaaagaatttggctcacagtgaattattcactttgtcttagttaactaaaaataaaatctgactgttaactacagaaatcatttcaaattctgtggtgataataaagtaatgaccgc

SEQ ID NO: 756 - DNA, 341 bp, Homo sapiens
  misc_feature 3: n = A,T,C or G
ggntataaacctattatttattgcagaactaataaaaaatccaaagccttgtatttgtacatctttattatctctaaagcactttcctcaacctaatttcagtttttacaattggtactcaagaaaatagagacagaaatcatttgattttgcccagaaaccatctgcttatatttataaggccacctaatttgaaatcacatatagaccaggcgcggtggctcacgcctgtaattccaacactttggaaggccaaggcaggtggatcacaaggtcaagagattgagaccatcttggccaacatggcgaaaccccgtctctaccaaaaatacaaaaatcag

SEQ ID NO: 757 - DNA, 479 bp, Homo sapiens
  misc_feature 4, 359, 425, 431: n = A,T,C or G
cgcnttactgtacatattgctagcagggagacaactggaaatactaaacaaatactggaattcacattacagacagacgaaaccaacatggatgccacacataacttcctttgtagtttcacagagagcctatttgtggttgctcaggtggggtcatacattgcttgcagaaatggcctgatcatagctctatgaaacaatgaattcggaatgaaatcttaccatgacacctctctgtaggaaagaaatgttgcttcacgtgtgctaagttgagataataatatttcacatatttatatacagagaatcactctcaaatttaacccaagataagcaataggatttgggggtgacttgtncacatttctaacaacacttttcttttttctagaggtcactctcaaacactgatatatcactatagnttgagngtagggattcaagtaatcaaaggttgttattgcaaaagagccaggcag

SEQ ID NO: 758 - DNA, 267 bp, Homo sapiens
  misc_feature 6: n = A,T,C or G
ccatgnctaggtttatagatagttgggtgggttggtgtaaatgagtgaggcaggagtccgaggaggttagttgtggcaataaaaatgattaaggatactagtataagagatcaggttcgtcctttagtgttgtgtatggctatcatttgttttgaggttagtttgactagtcattgttgggtggtaattagtcggttgttgatgagatatttggaggtggggatcaatagagggggaaatagaatgatcagtactgcggcgggtagg

SEQ ID NO: 759 - DNA, 449 bp, Homo sapiens
  misc_feature 371: n = A,T,C or G
cgaggtcttgaaatcagcaacacacttacaaatgagaaaatgaaaatagaagagtatataaagaaagggaaagaggattatgaagagagtcatcagagagctgtggctgcagaggtatccgtacttgaaaactggaaggagagtgaagtgtataagctacagatcatggagtcacaagcagaagcctttctgaagaagctggggctgattagccgtgatcctgcagcatatcccgacatggagtctgatatacgttcatgggaattgtttctttctaatgttacaaaagaaattgagaaagcaaagtctcagtttgaagaacaaattaaggcaattaaaaatggttcccggctcagtgaactttctaaagngcagatttctgagctttcatttcctgcctgtaacacggttcatcccgagttactccctgagtcttcaggccacgatgg

SEQ ID NO: 760 - DNA, 414 bp, Homo sapiens
  misc_feature 5, 34, 136, 169, 173, 209, 227, 246, 269, 274, 291, 316,341, 414: n = A,T,C or G
ccatnaactggaagcagctcactaaacaaacagnggcatacccatagaactgcatacttctcagcagtatgaaagaatgagctacttatataagcatcattgataaacctcaaaaaaaaaatgccacatgaagaancccaagggggagaaacataaaaactttatatgncagncatataaaattctagaaaatgcaaactaatccatcntaaaggaaagtaaatcancagttgtctggaggaccanagagagcaggaggagagagattnttaanggggttaaagtaaattngggagtgcccttccatttttaaatnctatgaaaatgaaagtaaaggcccntgcatgttgtaaactaatagtaacaaacagattgggttggagtggggtgttgtctggggacatcattacaaan

SEQ ID NO: 761 - DNA, 428 bp, Homo sapiens
gagcctcactaaaataacagatttcagtatagccaagttcatcagaaagactcaaatggaatgatttacaagatagaacactttaaaccaggtcagtcctatctttttgtagctgaaggctatcagtcataacacaatttcgcgtacacctctgctcattatggaattacacttaaaacgaatctcaagagggtgaccattgttgtttcagataccatccctaaggagagtggttaacaggaagattgccagtgttactgatggaaagaagtgtttgtttgttttttttcttgtcaaagacttacaccatagttttaaattaaactgtcaggcattttctcagacaggttttccttttcaatgcagtaatgaagaactaagataaaaatcatgacttttgactgccactcaacattattacatgcacc

SEQ ID NO: 762 - DNA, 574 bp, Homo sapiens
  misc_feature 47, 190, 449, 509, 510, 552: n = A,T,C or G
caggtctgaactgataagtattaagagacgtttgttgctagttaagngttccagttgagagttcgaagtgaaaacctgggctctttaccagtgttgagtgagaagatttatttctctttcctctgaatttaccacatgtaacatcacagagacatgtagagttcctttaggatttgcgatttgaaccagnccagtctgattttcaggtgaattctgtgaagagcttgatgggggaagtctgaagacagaaggaattagggaaaagggtgatacttacagagtaaaggaaataaatgaaaagataatggtatttttggtagccacagggaaatagcaggaggggactggagatcacacacacgcacacgcacacacacaaacacacacacacgctaaaactcaaactaaaaacctcccaaaggagctgctttgtttgcagacttcaattngaagtagatactaagggcaagaatagaccagttaaaattcacctgaaaatctcttcccanncttcaaatgtgctaaaatatcactgtcagcttagcatctctncatgtatgtatatatagatgta

SEQ ID NO: 763 - DNA, 465 bp, Homo sapiens
  misc_feature 41, 116, 411: n = A,T,C or G
cctactatgggtgttaaaattttttactctctctacaaggntttttcctagtgtccaaagagctgttcctctttggactaacagttaaatttacaaggggatttagagggttctgngggcaaatttaaagttgaactaagattctatcttggacaaccagctatcaccaggctcggtaggtttgtcgcctctacctataaatcttcccactattttgctacatagacgggtgtgctcttttagctgttcttaggtagctcgtctggtttcgggggtcttagctttggctctccttgcaaagttatttctagttaattcattatgcagaaggtataggggttagtccttgctatattatgcttggatataatttttcatctttcccttgcggtactatatctattgcgccangtttcaatttctatcgcctatactttatttgggtaaatggtttggctaaggttg

SEQ ID NO: 764 - DNA, 151 bp, Homo sapiens
ctgtcaattaatgctagtcctcaggatttaaaaaataatcttaactcaaagtccaatgcaaaaacattaagttggtaattactcttgatcttgaattacttccgttacgaaagtccttcacatttttcaaactaagctactatatttaagg

SEQ ID NO: 765 - DNA, 251 bp, Homo sapiens
gaagagcttatcacctttcatgatcacgccctcatagtcattttccttatctgcttcctagtcctgtatgcccttttcctaacactcacaacaaaactaactaatactaacatctcagacgctcaggaaatagtaaccgtctgaactatcctgcccgccatcatcctagtcctcatcgccctcccatccctacgcatcctttacataacagacgaggtcaacgatccctcccttaccatcaaatcaattgg

SEQ ID NO: 766 - DNA, 375 bp, Homo sapiens
  misc_feature 10: n = A,T,C or G
cgaggtctgncctcctggttcttcatccattattaacagaagagcatactggtttcggtccataaaatctttgggaagggacaactgtaaaggaagttcatagtcgtcaatatgaaggattttaatttctggctttcctatcttcttcttcaggatagcttccttcagcatagaattgttttccaatataaaatattttgctgggttgtccgtactatgtaggctgaccactgggacccttggaccttcacagaataataagaaatgttgattcatgggactaaaactggcatcaaaatatgtacattgttctttcatgaaattacatgaaatgcattggcgattcaataatccttcagtagaagcactgtacag

SEQ ID NO: 767 - DNA, 485 bp, Homo sapiens
  misc_feature 70, 160, 386, 408, 440, 484: n = A,T,C or G
cgaggtctgaaccctcgtggagccattcatacaggtccctaattaaggaacaagtgattatgctaccttngcacggttagggtaccgcggcccgttaaacatgtgtcactgggcaggcggtgcctctaatactggtgatgctagaggtgatgtttttggnaaacaggcggggtaagatttgccgagttccttttactttttttaacctttccttatgagcatgcctgtgttgggttgacagtgagggtaataatgacttgttggtgattgtagatattgggctgttaattgtcagttcagtgttttaatctgacgcaggcttatgcggaggagaatgttttcatgttacttatactaacattagttcttctatagggtgatagatnggtccaattgggtgtgaggagntcacttatatgtttgggattttttaggtaagngggtgttgagcttgaacgctttcttaattgggggctgcttttang

SEQ ID NO: 768 - DNA, 379 bp, Homo sapiens
  misc_feature 35: n = A,T,C or G
ctgatattctattaaagatacaaagaggagctggnaccatttcttctgaaactattacaaacaactgaaaaggtggaatttctccctaattcattttaggaggccagcattatactgataccaaaacctggcagaggtacaataataaaaggaaacttcaagtcagtatcactgatgaacaccaatgtgaaaatcctcaataaaatactggcaaactgaattcagcagcacatcaaaaagctaatccaccacaatcaagtcagcttcatccctgcgatgcaagtctggttcaacatatgcaaatcaataaatacaattcatcagataaacagagctaaagacaaaattcacatgattttctcaatagatgcagaaaagg

SEQ ID NO: 769 - DNA, 518 bp, Homo sapiens
  misc_feature 282, 460, 490: n = A,T,C or G
cgaggtccatatgatgatcagtctatatagtttaaggcgcagatacacaaattttcaaaaatatgggtagaatatagtcaatatgaatggaatagacaatgctttgaaaatcactggagggaggctttattgtttgtgaaaacatgttgtcatcactttttgctttaagcccttggtggtgaaataactcaaaccattcttccttatgctgaagatcgagaaccccaagtatcacatctaccatcccactcatcaatgtgattggtcagtctttgctgaggncctgcatagccagttttaaagttagagttcttgcatatacatatgaaaaggcatgttacttgtgctttcaaagagctttttgcttggtgtaaaaagaaaactcaaattacagtgtgatgtggaatataatggtggtagtttcatcgagatgatgggaaagaattgataagataaagcngaaagatgagcagaattttcagattgggtntggaaagagcacttaagaaagagggtgg

SEQ ID NO: 770 - DNA, 378 bp, Homo sapiens
  misc_feature 163, 283, 340: n = A,T,C or G
tatgggtcctgagtgtggaatataagataacaagacaattcccttgctttcaagggaaatcacactttataaaactttgaattcttgaaatgggtttcagaggttccaaggtcaaattcaagaataagagttaagaagaaaaagactatgagaaaggaagtgntgaccccatttgcatttaaatggcaggaatagtctcaatctactcattggggaaaaatgtatgttgcatatttttgagatattgcaacttgctctctctctttgccaccccaccctttgncatgctctgtttttgggctgaattggcaagaaaaatggctggagggctggaagaagntggacccttcttccttcttccttcttccttctttctcc

SEQ ID NO: 771 - DNA, 207 bp, Homo sapiens
cataaatattatactagcatttaccatctcacttctaggaatactagtatatcgctcacacctcatatcctccctactatgcctagaaggaataatactatcactgttcattatagctactctcataaccctcaacacccactccctcttagccaatattgtgcctattgccatactagtctttgccgcctgcgaagcagcggtagg

SEQ ID NO: 772 - DNA, 384 bp, Homo sapiens
  misc_feature 115: n = A,T,C or G
cctactatgggtgttaaattttttactctctctacaaggttttttcctagtgtccaaagagctgttcctctttggactaacagttaaatttacaaggggatttagagggttctgngggcaaatttaaagttgaactaagattctatcttggacaaccagctatcaccaggctcggtaggtttgtcgcctctacctataaatcttcccactattttgctacatagacgggtgtgctcttttagctgttcttaggtagctcgtctggtttcgggggtcttagctttggctctccttgcaaagttatttctagttaattcattatgcagaaggtataggggttagtccttgctatattatgcttggttataatttttcatctttccc

SEQ ID NO: 773 - DNA, 182 bp, Homo sapiens
cccttttcctaacactcacaacaaaactaactaatactaacatctcagacgctcagggaaatagaaaccgtctgaactatcctgcccgccatcatcctagtcctcatcgccctcccatccctacgcatcctttacataacagacgaggtcaacgatccctcccttaccatcaaatcaattgg

SEQ ID NO: 774 - DNA, 191 bp, Homo sapiens
ccatggctaggtttatagatagttgggtggttgggtgtaaatgagtgaggcaggagtccgaggaggttagttgtggcaataaaaatgattaaggatactagtataagagatcaggttcgtcctttagtgttgtgtatggctatcatttgttttgaggttagtttgattagtcattgttgggtggtaattag

SEQ ID NO: 775 - DNA, 192 bp, Homo sapiens
  misc_feature 12, 45, 51, 62, 90, 114, 134, 163: n = A,T,C or G
ccatggctaagntatatagatagctgggtggctggagtaaatgantgaggnacgagtccgangaggttagttgaggcaataaaaatgatnaaggatactagtataagagatcangttcgtcctttacatgttgngtatggctatcatttgttttgaggctagnttgattagtcattgttgggtggtaattaa

SEQ ID NO: 776 - DNA, 144 bp, Homo sapiens
ctgaccccctagaaccctggctctgccattagctaggacctaagactctgcccacattttggtctgttctctcccattacacataggtttgtctcagcatgcaagagtttttcctttaaaaaaaaaaaaaaaaaaaaaaaaaaa

SEQ ID NO: 777 - DNA, 483 bp, Homo sapiens
  misc_feature 14, 339, 461: n = A,T,C or G
cctactatgggtgntaaattttttactctctctacaaggttttttcctagtgtccaaagagctgttcctctttggactaacagttaagtttacaaggggatttagagggttctgtgggcaaatttaaagttgaactaagattctatcttggacaaccagctatcaccaggctcggtaggtttgtcgcctctacctataaatcttcccactattttgctacatagacgggtgtgctcttttagctgttcttaggtagctcgtctggtttcgggggtcttagctttggctctccttgcaaagttatttctagttaattcattatgcagaaggtataggggntaagtccttgctatattatgcttggatataatttttcatctttcccttgcggtactatatctattgcgccaggtttcaatttctgccgcctatactttatttgggtaaatggtttggctaangttgctggtagaaggtggagtg

SEQ ID NO: 778 - DNA, 393 bp, Homo sapiens
  misc_feature 295, 297, 370: n = A,T,C or G
ctgcatttttattgcgatctgcagatgaactgggaaaatctcattttacaacagaactgagacagacgaccaccatattcactgaggtctaaatttgcagtttccactaatgacattttgatttcccaacagagatacttctggtcttactgcacagtcttttaagagaaatacttccattatgccacattgtccttgatccgtaagtgatgtgttaaggtgcttcaaaggaactctgacctctgaagtacttgagctactttagtatgtccagcctattgctttttgttttagngngtcaccataaatatcaggggcataaaaggctatctattcttaattcaaggataaaacagaagaagcttgtggnataaaacaatagtcaagatccag

SEQ ID NO: 779 - DNA, 277 bp, Homo sapiens
  misc_feature 4: n = A,T,C or G
cctnttgatttgatgggtaaggggagggatcgttgacctcgtctgttatgtaaaggatgcgtagggatgggagggcgatgaggactaggatgatggcgggcaggatagttcagacggtttctatttcctgagcgtctgagatgttagtattagttagttttgttgtgagtgttaggaaaagggcatacaggactaggaagcagataaggaaaatgactatgagggcgtgatcatgaaaggtgataagctcttctatgataggggaagtagcgtcttg

SEQ ID NO: 780 - DNA, 328 bp, Homo sapiens
  misc_feature 5, 19, 33, 38, 84, 323: n = A,T,C or G
catgntatggataaccatnttaactgtattttntgcancccgtaccttcttgggaatacaattgtctaactttttatttttggnctggctgttgtggtgtgcaaaactccgtacattgctattttgccacactgcaacaccttacagatgtggaagatgtgaaatttgtcatcaattatgactaccctaactcctcagaggattatattcatcgaattggaagaactgctcgcagtaccaaaacaggcacagcatacactttctttacacctaataacataaagcaggggagcgaccttatctctgtgcttcgggaagctaancaaac

SEQ ID NO: 781 - DNA, 305 bp, Homo sapiens
  misc_feature 75, 237: n = A,T,C or G
ctgttcagaaagctcattggacctggttttgaaaataaaacaaagttaaaaccctgggaggagttattgtgcagngtggagtactcaggctttcttataaagaaaaaaaaagttatctggtaccaaagtgtgcaacctacagaccctcaggtactgccctgtgacttctctgtatgacatcacaaggctgccaagtgcctgtttttctagaactaggagttggtgaggtttggctantgctgaaaccatgcataggattggtttactaaattaaaaccttattacgtacgtcctccaaaagacag

SEQ ID NO: 782 - DNA, 497 bp, Homo sapiens
  misc_feature 385, 433, 440, 471: n = A,T,C or G
cgaggtggctttaattgatgttaatgccttatgtcaaatgtaaagttagaatttgctagggctgggatagggagtgatatttctaggacttagacattgaaaactaattcagcctgtagtaacctggatggttttcaatggcatggttagtcaaattcatggttttaaacttagaagcagctttcgggggagagggtaggttggagcatttattacatattttactgtttaatgtcttaaccgtgggccttttaatttgtaaacactgaaatgattgttgggctgtggaaaacatttacctatttaccttggaagttttaaaagacagtccactttttagcatgtgtgttgcgtccagcctgtggtcgtcttaactaataaatgngatttttctctcaaaaaaaaaacctccccgggcggccgctcaagggcnaattccncacactggcggccgttactaggggatccganctcggtccaagcttggcgtaatcatg

SEQ ID NO: 783 - protein, 364 aa, Homo sapiens
MWQPLFFKWLLSCCPGSSQIAAAASTQPEDDINTQRKKSQEKMREVTDSPGRPRELTIPQTSSHGANRFVPKSKALEAVKLAIEAGFHHIDSAHVYNNEEQVGLAIRSKIADGSVKREDIFYTSKLWSNSHRPELVRPALERSLKNLQLDYVDLYLIHFPVSVKPGEEVIPKDENGKILFDTVDLCATWEAMEKCKDAGLAKSIGVSNFNHRLLEMILNKPGLKYKPVCNQVECHPYFNQRKLLDFCKSKDIVLVAYSALGSHREEPWVDPNSPVLLEDPVLCALAKKHKRTPALIALRYQLQRGVVVLAKSYNEQRIRQNVQVFEFQLTSEEMKAIDGLNRNVRYLTLDIFAGPPNYPFSDEY

SEQ ID NO: 784 - DNA, 6353 bp, Homo sapiens
tggcgaatgggacgcgccctgtagcggcgcattaagcgcggcgggtgtggtggttacgcgcagcgtgaccgctacacttgccagcgccctagcgcccgctcctttcgctttcttcccttcctttctcgccacgttcgccggctttccccgtcaagctctaaatcgggggctccctttagggttccgatttagtgctttacggcacctcgaccccaaaaaacttgattagggtgatggttcacgtagtgggccatcgccctgatagacggtttttcgccctttgacgttggagtccacgttctttaatagtggactcttgttccaaactggaacaacactcaaccctatctcggtctattcttttgatttataagggattttgccgatttcggcctattggttaaaaaatgagctgatttaacaaaaatttaacgcgaattttaacaaaatattaacgtttacaatttcaggtggcacttttcggggaaatgtgcgcggaacccctatttgtttatttttctaaatacattcaaatatgtatccgctcatgaattaattcttagaaaaactcatcgagcatcaaatgaaactgcaatttattcatatcaggattatcaataccatatttttgaaaaagccgtttctgtaatgaaggagaaaactcaccgaggcagttccataggatggcaagatcctggtatcggtctgcgattccgactcgtccaacatcaatacaacctattaatttcccctcgtcaaaaataaggttatcaagtgagaaatcaccatgagtgacgactgaatccggtgagaatggcaaaagtttatgcatttctttccagacttgttcaacaggccagccattacgctcgtcatcaaaatcactcgcatcaaccaaaccgttattcattcgtgattgcgcctgagcgagacgaaatacgcgatcgctgttaaaaggacaattacaaacaggaatcgaatgcaaccggcgcaggaacactgccagcgcatcaacaatattttcacctgaatcaggatattcttctaatacctggaatgctgttttcccggggatcgcagtggtgagtaaccatgcatcatcaggagtacggataaaatgcttgatggtcggaagaggcataaattccgtcagccagtttagtctgaccatctcatctgtaacatcattggcaacgctacctttgccatgtttcagaaacaactctggcgcatcgggcttcccatacaatcgatagattgtcgcacctgattgcccgacattatcgcgagcccatttatacccatataaatcagcatccatgttggaatttaatcgcggcctagagcaagacgtttcccgttgaatatggctcataacaccccttgtattactgtttatgtaagcagacagttttattgttcatgaccaaaatcccttaacgtgagttttcgttccactgagcgtcagaccccgtagaaaagatcaaaggatcttcttgagatcctttttttctgcgcgtaatctgctgcttgcaaacaaaaaaaccaccgctaccagcggtggtttgtttgccggatcaagagctaccaactctttttccgaaggtaactggcttcagcagagcgcagataccaaatactgtccttctagtgtagccgtagttaggccaccacttcaagaactctgtagcaccgcctacatacctcgctctgctaatcctgttaccagtggctgctgccagtggcgataagtcgtgtcttaccgggttggactcaagacgatagttaccggataaggcgcagcggtcgggctgaacggggggttcgtgcacacagcccagcttggagcgaacgacctacaccgaactgagatacctacagcgtgagctatgagaaagcgccacgcttcccgaagggagaaaggcggacaggtatccggtaagcggcagggtcggaacaggagagcgcacgagggagcttccagggggaaacgcctggtatctttatagtcctgtcgggtttcgccacctctgacttgagcgtcgatttttgtgatgctcgtcaggggggcggagcctatggaaaaacgccagcaacgcggcctttttacggttcctggccttttgctggccttttgctcacatgttctttcctgcgttatcccctgattctgtggataaccgtattaccgcctttgagtgagctgataccgctcgccgcagccgaacgaccgagcgcagcgagtcagtgagcgaggaagcggaagagcgcctgatgcggtattttctccttacgcatctgtgcggtatttcacaccgcatatatggtgcactctcagtacaatctgctctgatgccgcatagttaagccagtatacactccgctatcgctacgtgactgggtcatggctgcgccccgacacccgccaacacccgctgacgcgccctgacgggcttgtctgctcccggcatccgcttacagacaagctgtgaccgtctccgggagctgcatgtgtcagaggttttcaccgtcatcaccgaaacgcgcgaggcagctgcggtaaagctcatcagcgtggtcgtgaagcgattcacagatgtctgcctgttcatccgcgtccagctcgttgagtttctccagaagcgttaatgtctggcttctgataaagcgggccatgttaagggcggttttttcctgtttggtcactgatgcctccgtgtaagggggatttctgttcatgggggtaatgataccgatgaaacgagagaggatgctcacgatacgggttactgatgatgaacatgcccggttactggaacgttgtgagggtaaacaactggcggtatggatgcggcgggaccagagaaaaatcactcagggtcaatgccagcgcttcgttaatacagatgtaggtgttccacagggtagccagcagcatcctgcgatgcagatccggaacataatggtgcagggcgctgacttccgcgtttccagactttacgaaacacggaaaccgaagaccattcatgttgttgctcaggtcgcagacgttttgcagcagcagtcgcttcacgttcgctcgcgtatcggtgattcattctgctaaccagtaaggcaaccccgccagcctagccgggtcctcaacgacaggagcacgatcatgcgcacccgtggggccgccatgccggcgataatggcctgcttctcgccgaaacgtttggtggcgggaccagtgacgaaggcttgagcgagggcgtgcaagattccgaataccgcaagcgacaggccgatcatcgtcgcgctccagcgaaagcggtcctcgccgaaaatgacccagagcgctgccggcacctgtcctacgagttgcatgataaagaagacagtcataagtgcggcgacgatagtcatgccccgcgcccaccggaaggagctgactgggttgaaggctctcaagggcatcggtcgagatcccggtgcctaatgagtgagctaacttacattaattgcgttgcgctcactgcccgctttccagtcgggaaacctgtcgtgccagctgcattaatgaatcggccaacgcgcggggagaggcggtttgcgtattgggcgccagggtggtttttcttttcaccagtgagacgggcaacagctgattgcccttcaccgcctggccctgagagagttgcagcaagcggtccacgctggtttgccccagcaggcgaaaatcctgtttgatggtggttaacggcgggatataacatgagctgtcttcggtatcgtcgtatcccactaccgagatatccgcaccaacgcgcagcccggactcggtaatggcgcgcattgcgcccagcgccatctgatcgttggcaaccagcatcgcagtgggaacgatgccctcattcagcatttgcatggtttgttgaaaaccggacatggcactccagtcgccttcccgttccgctatcggctgaatttgattgcgagtgagatatttatgccagccagccagacgcagacgcgccgagacagaacttaatgggcccgctaacagcgcgatttgctggtgacccaatgcgaccagatgctccacgcccagtcgcgtaccgtcttcatgggagaaaataatactgttgatgggtgtctggtcagagacatcaagaaataacgccggaacattagtgcaggcagcttccacagcaatggcatcctggtcatccagcggatagttaatgatcagcccactgacgcgttgcgcgagaagattgtgcaccgccgctttacaggcttcgacgccgcttcgttctaccatcgacaccaccacgctggcacccagttgatcggcgcgagatttaatcgccgcgacaatttgcgacggcgcgtgcagggccagactggaggtggcaacgccaatcagcaacgactgtttgcccgccagttgttgtgccacgcggttgggaatgtaattcagctccgccatcgccgcttccactttttcccgcgttttcgcagaaacgtggctggcctggttcaccacgcgggaaacggtctgataagagacaccggcatactctgcgacatcgtataacgttactggtttcacattcaccaccctgaattgactctcttccgggcgctatcatgccataccgcgaaaggttttgcgccattcgatggtgtccgggatctcgacgctctcccttatgcgactcctgcattaggaagcagcccagtagtaggttgaggccgttgagcaccgccgccgcaaggaatggtgcatgcaaggagatggcgcccaacagtcccccggccacggggcctgccaccatacccacgccgaaacaagcgctcatgagcccgaagtggcgagcccgatcttccccatcggtgatgtcggcgatataggcgccagcaaccgcacctgtggcgccggtgatgccggccacgatgcgtccggcgtagaggatcgagatctcgatcccgcgaaattaatacgactcactataggggaattgtgagcggataacaattcccctctagaaataattttgtttaactttaagaaggagatatacatatgcagcatcaccaccatcaccactggcagcccctcttcttcaagtggctcttgtcctgttgccctgggagttctcaaattgctgcagcagcctccacccagcctgaggatgacatcaatacacagaggaagaagagtcaggaaaagatgagagaagttacagactctcctgggcgaccccgagagcttaccattcctcagacttcttcacatggtgctaacagatttgttcctaaaagtaaagctctagaggccgtcaaattggcaatagaagccgggttccaccatattgattctgcacatgtttacaataatgaggagcaggttggactggccatccgaagcaagattgcagatggcagtgtgaagagagaagacatattctacacttcaaagctttggagcaattcccatcgaccagagttggtccgaccagccttggaaaggtcactgaaaaatcttcaattggactatgttgacctctatcttattcattttccagtgtctgtaaagccaggtgaggaagtgatcccaaaagatgaaaatggaaaaatactatttgacacagtggatctctgtgccacatgggaggccatggagaagtgtaaagatgcaggattggccaagtccatcggggtgtccaacttcaaccacaggctgctggagatgatcctcaacaagccagggctcaagtacaagcctgtctgcaaccaggtggaatgtcatccttacttcaaccagagaaaactgctggatttctgcaagtcaaaagacattgttctggttgcctatagtgctctgggatcccatcgagaagaaccatgggtggacccgaactccccggtgctcttggaggacccagtcctttgtgccttggcaaaaaagcacaagcgaaccccagccctgattgccctgcgctaccagctgcagcgtggggttgtggtcctggccaagagctacaatgagcagcgcatcagacagaacgtgcaggtgtttgaattccagttgacttcagaggagatgaaagccatagatggcctaaacagaaatgtgcgatatttgacccttgatatttttgctggcccccctaattatccattttctgatgaatattaatgactcgagcaccaccaccaccaccactgagatccggctgctaacaaagcccgaaaggaagctgagttggctgctgccaccgctgagcaataactagcataaccccttggggcctctaaacgggtcttgaggggttttttgctgaaaggaggaactatatccggat

SEQ ID NO: 785 - DNA, 5502 bp, Homo sapiens
tggcgaatgggacgcgccctgtagcggcgcattaagcgcggcgggtgtggtggttacgcgcagcgtgaccgctacacttgccagcgccctagcgcccgctcctttcgctttcttcccttcctttctcgccacgttcgccggctttccccgtcaagctctaaatcgggggctccctttagggttccgatttagtgctttacggcacctcgaccccaaaaaacttgattagggtgatggttcacgtagtgggccatcgccctgatagacggtttttcgccctttgacgttggagtccacgttctttaatagtggactcttgttccaaactggaacaacactcaaccctatctcggtctattcttttgatttataagggattttgccgatttcggcctattggttaaaaaatgagctgatttaacaaaaatttaacgcgaattttaacaaaatattaacgtttacaatttcaggtggcacttttcggggaaatgtgcgcggaacccctatttgtttatttttctaaatacattcaaatatgtatccgctcatgaattaattcttagaaaaactcatcgagcatcaaatgaaactgcaatttattcatatcaggattatcaataccatatttttgaaaaagccgtttctgtaatgaaggagaaaactcaccgaggcagttccataggatggcaagatcctggtatcggtctgcgattccgactcgtccaacatcaatacaacctattaatttcccctcgtcaaaaataaggttatcaagtgagaaatcaccatgagtgacgactgaatccggtgagaatggcaaaagtttatgcatttctttccagacttgttcaacaggccagccattacgctcgtcatcaaaatcactcgcatcaaccaaaccgttattcattcgtgattgcgcctgagcgagacgaaatacgcgatcgctgttaaaaggacaattacaaacaggaatcgaatgcaaccggcgcaggaacactgccagcgcatcaacaatattttcacctgaatcaggatattcttctaatacctggaatgctgttttcccggggatcgcagtggtgagtaaccatgcatcatcaggagtacggataaaatgcttgatggtcggaagaggcataaattccgtcagccagtttagtctgaccatctcatctgtaacatcattggcaacgctacctttgccatgtttcagaaacaactctggcgcatcgggcttcccatacaatcgatagattgtcgcacctgattgcccgacattatcgcgagcccatttatacccatataaatcagcatccatgttggaatttaatcgcggcctagagcaagacgtttcccgttgaatatggctcataacaccccttgtattactgtttatgtaagcagacagttttattgttcatgaccaaaatcccttaacgtgagttttcgttccactgagcgtcagaccccgtagaaaagatcaaaggatcttcttgagatcctttttttctgcgcgtaatctgctgcttgcaaacaaaaaaaccaccgctaccagcggtggtttgtttgccggatcaagagctaccaactctttttccgaaggtaactggcttcagcagagcgcagataccaaatactgtccttctagtgtagccgtagttaggccaccacttcaagaactctgtagcaccgcctacatacctcgctctgctaatcctgttaccagtggctgctgccagtggcgataagtcgtgtcttaccgggttggactcaagacgatagttaccggataaggcgcagcggtcgggctgaacggggggttcgtgcacacagcccagcttggagcgaacgacctacaccgaactgagatacctacagcgtgagctatgagaaagcgccacgcttcccgaagggagaaaggcggacaggtatccggtaagcggcagggtcggaacaggagagcgcacgagggagcttccagggggaaacgcctggtatctttatagtcctgtcgggtttcgccacctctgacttgagcgtcgatttttgtgatgctcgtcaggggggcggagcctatggaaaaacgccagcaacgcggcctttttacggttcctggccttttgctggccttttgctcacatgttctttcctgcgttatcccctgattctgtggataaccgtattaccgcctttgagtgagctgataccgctcgccgcagccgaacgaccgagcgcagcgagtcagtgagcgaggaagcggaagagcgcctgatgcggtattttctccttacgcatctgtgcggtatttcacaccgcatatatggtgcactctcagtacaatctgctctgatgccgcatagttaagccagtatacactccgctatcgctacgtgactgggtcatggctgcgccccgacacccgccaacacccgctgacgcgccctgacgggcttgtctgctcccggcatccgcttacagacaagctgtgaccgtctccgggagctgcatgtgtcagaggttttcaccgtcatcaccgaaacgcgcgaggcagctgcggtaaagctcatcagcgtggtcgtgaagcgattcacagatgtctgcctgttcatccgcgtccagctcgttgagtttctccagaagcgttaatgtctggcttctgataaagcgggccatgttaagggcggttttttcctgtttggtcactgatgcctccgtgtaagggggatttctgttcatgggggtaatgataccgatgaaacgagagaggatgctcacgatacgggttactgatgatgaacatgcccggttactggaacgttgtgagggtaaacaactggcggtatggatgcggcgggaccagagaaaaatcactcagggtcaatgccagcgcttcgttaatacagatgtaggtgttccacagggtagccagcagcatcctgcgatgcagatccggaacataatggtgcagggcgctgacttccgcgtttccagactttacgaaacacggaaaccgaagaccattcatgttgttgctcaggtcgcagacgttttgcagcagcagtcgcttcacgttcgctcgcgtatcggtgattcattctgctaaccagtaaggcaaccccgccagcctagccgggtcctcaacgacaggagcacgatcatgcgcacccgtggggccgccatgccggcgataatggcctgcttctcgccgaaacgtttggtggcgggaccagtgacgaaggcttgagcgagggcgtgcaagattccgaataccgcaagcgacaggccgatcatcgtcgcgctccagcgaaagcggtcctcgccgaaaatgacccagagcgctgccggcacctgtcctacgagttgcatgataaagaagacagtcataagtgcggcgacgatagtcatgccccgcgcccaccggaaggagctgactgggttgaaggctctcaagggcatcggtcgagatcccggtgcctaatgagtgagctaacttacattaattgcgttgcgctcactgcccgctttccagtcgggaaacctgtcgtgccagctgcattaatgaatcggccaacgcgcggggagaggcggtttgcgtattgggcgccagggtggtttttcttttcaccagtgagacgggcaacagctgattgcccttcaccgcctggccctgagagagttgcagcaagcggtccacgctggtttgccccagcaggcgaaaatcctgtttgatggtggttaacggcgggatataacatgagctgtcttcggtatcgtcgtatcccactaccgagatatccgcaccaacgcgcagcccggactcggtaatggcgcgcattgcgcccagcgccatctgatcgttggcaaccagcatcgcagtgggaacgatgccctcattcagcatttgcatggtttgttgaaaaccggacatggcactccagtcgccttcccgttccgctatcggctgaatttgattgcgagtgagatatttatgccagccagccagacgcagacgcgccgagacagaacttaatgggcccgctaacagcgcgatttgctggtgacccaatgcgaccagatgctccacgcccagtcgcgtaccgtcttcatgggagaaaataatactgttgatgggtgtctggtcagagacatcaagaaataacgccggaacattagtgcaggcagcttccacagcaatggcatcctggtcatccagcggatagttaatgatcagcccactgacgcgttgcgcgagaagattgtgcaccgccgctttacaggcttcgacgccgcttcgttctaccatcgacaccaccacgctggcacccagttgatcggcgcgagatttaatcgccgcgacaatttgcgacggcgcgtgcagggccagactggaggtggcaacgccaatcagcaacgactgtttgcccgccagttgttgtgccacgcggttgggaatgtaattcagctccgccatcgccgcttccactttttcccgcgttttcgcagaaacgtggctggcctggttcaccacgcgggaaacggtctgataagagacaccggcatactctgcgacatcgtataacgttactggtttcacattcaccaccctgaattgactctcttccgggcgctatcatgccataccgcgaaaggttttgcgccattcgatggtgtccgggatctcgacgctctcccttatgcgactcctgcattaggaagcagcccagtagtaggttgaggccgttgagcaccgccgccgcaaggaatggtgcatgcaaggagatggcgcccaacagtcccccggccacggggcctgccaccatacccacgccgaaacaagcgctcatgagcccgaagtggcgagcccgatcttccccatcggtgatgtcggcgatataggcgccagcaaccgcacctgtggcgccggtgatgccggccacgatgcgtccggcgtagaggatcgagatctcgatcccgcgaaattaatacgactcactataggggaattgtgagcggataacaattcccctctagaaataattttgtttaactttaagaaggagatatacatatgcagcatcaccaccatcaccactggcagcccctcttcttcaagtggctcttgtcctgttgccctgggagttctcaaattgctgcagcagcctccacccagcctgaggatgacatcaatacacagaggaagaagagtcaggaaaagatgagagaagttacagactctcctgggcgaccccgagagcttaccattcctcagacttcttcacatggtgctaacagatttgtttgatgaattctgcagatatccatcacactggcggccgctcgagcaccaccaccaccaccactgagatccggctgctaacaaagcccgaaaggaagctgagttggctgctgccaccgctgagcaataactagcataaccccttggggcctctaaacgggtcttgaggggttttttgctgaaaggaggaactatatccggat

SEQ ID NO: 786 - protein, 108 aa, Homo sapiens
RRSCEPATRVPEVWILSPLLRHGGHTQTQNHTASPRSPVMESPKKKNQQLKVGILHLGSRQKKIRIQLRSQVLGREMRDMEGDLQELHQSNTGDKSGFGFRRQGEDNT

SEQ ID NO: 787 - protein, 152 aa, Homo sapiens
RPKEEVPRSKALEVTKLAIEAGFRHIDSAHLYNNEEQVGLAIRSKIADGSVKREDIFYTSKLWSTFHRPELVRPALENSLKKAQLDYVDLYLIHSPMSLKPGEELSPTDENGKVIFDIVDLCTTWEAMEKCKDAGLAKSIGVSNFNPQAAGD

SEQ ID NO: 788 - DNA, 1633 bp, Homo sapiens; identical to SEQ ID NO: 316

SEQ ID NO: 789 - protein, 200 aa, Homo sapiens
MAKGDPKKPKGKMSAYAFFVQTCREEHKKKNPEVPVNFAEFSKKCSERWKTMSGKEKSKFDEMAKADKVRYDREMKDYGPAKGGKKKKDPNAPKRPPSGFFLFCSEFRPKIKSTNPGISIGDVAKKLGEMWNNLNDSEKQPYITKAAKLKEKYEKDVADYKSKGKFDGAKGPAKVARKKVEEEDEEEEEEEEEEEEEEDE

SEQ ID NO: 790 - DNA, 457 bp, Homo sapiens
ttcgcctgtgttgggaacgcggcggagctgtgagccggcgactcgggtccctgaggtctggattctttctccgctactgagacacggcggacacacacaaacacagaaccacacagccagtcccaggagcccagtaatggagagccccaaaaagaagaaccagcagctgaaagtcgggatcctacacctgggcagcagacagaagaagatcaggatacagctgagatcccagtgcgcgacatggaaggtgatctgcaagagctgcatcagtcaaacaccggggataaatctggatttgggttccggcgtcaaggtgaagataatacctaaagaggaacactgtaaaatgccagaagcaggtgaagagcaaccacaagtttaaatgaagacaagctgaaacaacgcaagctggttttatattagatatttgacttaaactatctcaataaagttttgc

SEQ ID NO: 791 - protein, 126 aa, Homo sapiens
SPVLGTRRSCEPATRVPEVWILSPLLRHGGHTQTQNHTASPRSPVMESPKKKNQQLKVGILHLGSRQKKIRIQLRSQCATWKVICKSCISQTPGINLDLGSGVKVKIIPKEEHCKMPEAGEEQPQV

SEQ ID NO: 792 - DNA, 461 bp, Homo sapiens
cggcggagctgtgagccggcgactcgggtccctgaggtctggattctttctccgctactgagacacggcggacacacacaaacacagaaccacacagccagtcccaggagcccagtaatggagagccccaaaaagaagaaccagcagctgaaagtcgggatcctacacctgggcagcagacagaagaagatcaggatacagctgagatcccaggtgctgggaagggaaatgcgcgacatggaaggtgatctgcaagagctgcatcagtcaaacaccggggataaatctggatttgggttccggcgtcaaggtgaagataatacctaaagaggaacactgtaaaatgccagaagcaggtgaagagcaaccacaagtttaaatgaagacaagctgaaacaacgcaagctggttttatattagatatttgacttaaactatctcaataaagttttgcagctttc

SEQ ID NO: 793 - protein, 108 aa, Homo sapiens; identical to SEQ ID NO: 786

SEQ ID NO: 794 - DNA, 970 bp, Homo sapiens
tgggctcccagagctcgggtcctttgcagcctccaccctggcgatggctccctggtcctactttctctctcaaactggctttttctcattcctttgactccgccagacttcctcgcccccatgacctggtgttgtgtctgatcaccccaacattcctggctgcccaatgtggggcaatgaagaccccagtgaaggaatgctagagtgtgtgaaagtggaggacgcatcgtcaaaggacacctgaggacgtctcaaagaagctcggcgggagagctgagcgctcggaagaaccaagaatcatctcttttgaaaaatcgattcatcaaatgaatcttcagccaacaactgttcaagaaggatgcaaatatcacagtgttagatgaactttctggttgacacctgacaggaagagcctctgtattggaccaccatgtttgtgctcactgtgtagtaacaaaccaacacaccaaaatagcgggagttgccactgacaaagagttgaatgatcaaatgacggccaaaggaggaggttccgagaagtaaagctttggaggtcacaaaattagcaatagaagctgggttccgccatatagattctgctcatttatacaataatgaggagcaggttggactggccatccgaagcaagattgcagatggcagtgtgaagagagaagacatattctacacttcaaagctttggtccacttttcatcgaccagagttggtccgaccagccttggaaaactcactgaaaaaagctcaattggactatgttgacctctatcttattcattctccaatgtctctaaagccaggtgaggaactttcaccaacagatgaaaatggaaaagtaatatttgacatagtggatctctgtaccacctgggaggccatggagaagtgtaaggatgcaggattggccaagtccattggggtgtcaaacttcaacccgcaggcagctggagat

SEQ ID NO: 795 - protein, 152 aa, Homo sapiens; identical to SEQ ID NO: 787

SEQ ID NO: 796 - DNA, 2435 bp, Homo sapiens
atccactcgggccgcatcgccgcggtgcacaacgtgccgctgagcgtgctcatccggccgctgccgtccgtgttggaccccgccaaggtgcagagcctcgtggacacgatccgggaggacccagacagcgtgccccccatcgatgtcctctggatcaaaggggcccagggaggtgactacttctactcctttgggggctgccaccgctacgcggcctaccagcaactgcagcgagagaccatccccgccaagcttgtccagtccactctctcagacctaagggtgtacctgggagcatccacaccagacttgcagtagcagcctccttggcacctgctgccaccttcaagagcccagaagacacacctggcctccagcaggctgggccatgcagaagggatagcaggggtgcattctctttgcacctggcgagagggtctgactctgggcacccctctcaccagctacaaggccttggactcactgtacagtgtgggagccccagttcccacctctgtgacaataggatcatggccttacccttgaagcattaccgagaaggagaacagagatgggcttgaagagccacgtgctgccggctccaaattcccaaggacaaggatccctctgcatttttgtctatgtaacctcttatatggactacattcagctgcaaggaaaggaaaaccttgattgcagtggtttaaacaaacagaagattgtttttccacatagcatggattctggagatgggtggctaatggtattggttcaacaactccacgaaggtaggggtcacgtcttggatccttttgccttaatctcagtgctcgttacttcatggtcccaagatggctgctgtatccccaagaatcatgtctgcgttcaaggaaggaggggtggaggaagaggaagggccaaactagctggacccgtcaccttctatcagaaagtaaaacctcgtcagaagtctgtttcctgctctctccctctgcatatcttcacttagatgcccttggcccgagccagctaccattgcacctctagctgcaaacaaagctaagacagcagggaacagaattgtcatggctgaatagaccaatcgtgttccatctactgagactggcacactgcctcctgcaataaaactgggatcccattaccaagagagaaatgcagaattgtgtaccagttagcttttgctgtgtaacaaaccatccccaaacttggcagctagaaacaaaccctgtattttcccacaatcctatgggttggcaatttgggctgggctcaacagggcagttctgctgctcacacctgggatccctcatggagctaaggtcagctgttacctcagctgggcctggatggtctaggatagccttactcacttgcctggcaggtgacaggctgttggctggaattgcttggttctcctccatgtggcctctccagcaggctagctcaggcttattcacatgatggcttcaggattccaaagagagtgagagtagaagctgaaagacttcttgagttcttggcctggaactgggactaggacagtgtcacttctgctaagttcttttggtcagagcaaatcacaaggctttacccagattcaagggatgagaaacagactacatgtcttgatgaggggaaccacaaagagcttgtggccatttttcacctatcacaaataattttggatgggtatttatttggataaaggtatttccctcttccccctttctctctgtctcatggggcctcactctgccaagttggaaggcactaagacattgtcctggccctcagggtctaggggaagaggtgttggggcaggaagtgagtctctccatgggctggacccactgtagtaggagtgcctccttgtctgcactgctggtatggggttaggccaggtaggacattccagaggggcttctgaaaaccaagagtccctggggaaagggaacagagtaaggcaggccttgttctcactgccctctaagggaacttggtcactcggcacttttaagcctcagtttctccagttcaataataaggacaagagcttttcccatgcattctctttccccgggaaagttgactgaggtgaccagtaatagaattgaaaagggagagtgtcttcagtgcaatgtggcatcctggattgggtcttggaacaaaaacaggacattagtgggaaaattggaaatctgaaaaaagtctgaattttagttaatataccaatttcagtcycttggttttgacagatgtaccatggtgatgtaagatgttgaccttggggtaggctgggtgaagggtatacaggaactctttgtactatctctgcaacttctctgtaaatctagtatcattccaaaataaaagtttatttaatttaaaaaaaaaaaaaaaaaaaaaaaaaaaaa

SEQ ID NO: 797 - protein, 120 aa, Homo sapiens [sequence omitted]

SEQ ID NO: 798 - protein, 164 aa, Homo sapiens
PRVRGRVGSASHGGTWRAEPESGWGPRGRGRTAAGSGEKRALPWHGPPPPAARNGMARPELRPGGGGESRGGGDDGAACRRNAGQGRRGSGGARGARAERRRAGRQHPLGPHRRGAQRAAERAHPAAAVRVGPRQGAEPRGHDPGGPRQRAPHRCPLDQRGPGR

SEQ ID NO: 799 - protein, 60 aa, Homo sapiens
HASADAWAARVMAAPGERSRSRAGDRGVEAGPRRGRGRNARCPGTGPPPRPRGMVWPGRS

SEQ ID NO: 800 - DNA, 2477 bp, Homo sapiens
gccttggcaaaaaagcacaagcgaaccccagccctgattgccctgcgctaccagctacagcgtggggttgtggtcctggccaagagctacaatgagcagcgcatcagacagaacgtgcaggtgtttgaattccagttgacttcagaggagatgaaagccatagatggcctaaacagaaatgtgcgatatttgacccttgatatttttgctggcccccctaattatccattttctgatgaatattaacatggagggcattgcatgaggtctgccagaaggccctgcgtgtggatggtgacacagaggatggctctatgctggtgactggacacatcgcctctggttaaatctctcctgcttggtgatttcagcaagctacagcaaagcccattggccagaaaggaaagacaataattttgttttttcattttgaaaaaattaaatgctctctcctaaagattcttcacctactttggtctccataacttctatgttttctttccttctgacacactagtgcccctaaattgtgatttgcctatacgtttagggccggggttggaagatgttaacaaccatttaagattcatttctgcagtgggagtgggtggagtttcaccctctgggaaaggggcaggtgacaggtatttatcagtcagtgcctctctagctcttgtaggaagaagcacacgcaggatggagtctagaggatgagcgatattgactagcaattcatgggctccctccagcagtgcgagggtcagagtttctggagccttgggaggaggcatccctgtgagggggggttagggagatgggagggcaccaggaaaagtgattagaagtcaggtatgggaaggctaaataggacagagtcgagtacatctctgcttggaaaaacatatcaacacccttttttttgaacattatatcttgctcataaaagaaaactttccacattgttttaacaaaccccacagctgagagtcaggcctgaatctttgatgtgtgcccagtcacagagttgaccctattggtttgtggtggggcagggcatcaaagacatcattgactaatcacattcccctgaatagctcatatttagaaaatattcttagattctaaaaatgtactattaatttgtgatattcagtcttttaaatattttatacattaaacaggcatagttacaaatataaaacaaaaatatcccaaagccattatgcatggcactcaagattaaaatgggaaataatacatctaataaatcaaatgttccaagacttcaaaggtcttttggaaacaggctatgtaaaacagcacactggtttcaaactttggtaaattttaagaacaactcttacaaaggcatttaattcttatacataattttcaggggacctaagttaatcagctaatcatgaagacatgattttcattttagaaaacacttttgaaaacttgggataatctcatgccttaatgatcaaagcattatgagaaggacagtggtttttaacctgggcatatgttctaacacatttactctccactattcgtactctggtagccatgttaaccccatcagagattccttctcaagccatgtctcagagctgagaggcatcccagcaagttttgcagctcacagttttttccgtaaattacttattctataaaattggagtaggccataaactttggagggccctagaccaattttttggattatttttcgtcttctatcattccgctgatcttagatattctctgcattaaatattaaatatcacttctaggctgaaaaatccccctaaaaatatttctagctcagatttttcctccaaattctgcaatagaagatcacaatgtgaactctgcatctccatgttaaagtctaatggacattcacacttagcatgtctcaaagaaatctcatgtaaaccatggccatcctgttctaccttaactttctgagtctatggaatgataatttcacatctcataaacttgactgatgtaagtgtcaagaaaagattgacattttgttaaaagttagtagtgaagtgtgtaacgcttaagcaaactttcatatttcaaatctctttagcaagtgtaactcttttttcaagatgtgaaataatcattaggtcagtcatttgtaaatagtacatctgctatggactttttccagttcttcaccatccatttttataaaactcttattgttaaaaaaaaagttactcagaatttcataaagccaaacacctgatttcaggaacacttgagatgtaagaaaattttatagggacctccaatcactaattttcctattttttctctcaaagaaatgctgaagggaggaattcaggttgaatgaaaggaaatagtaacttacagccatatagagttataaagacttcttgtaaatgtgaacatatggtaaaatataaaaacatgtatttttgaaaaaaaaa

SEQ ID NO: 801 - DNA, 1619 bp, Homo sapiens
ggtacgcgcccgcttgcgctccggcctctactcggcggtcatcgtctacgacgagcgcagcccgcgcgccgagagcctccgcgaggacagcaccgtgtcgctggtggtgcaggcgctgcgccgcaacgccgagcgcaccgacatctgcctgctcaaaggcggctatgagaggttttcctccgagtacccagaattctgttctaaaaccaaggccctggcagccatcccacccccggttccccccagtgccacagagcccttggacctgggctgcagctcctgtgggaccccactacacgaccaggggggtcctgtggagatccttcccttcctctacctcggcagtgcctaccatgctgcccggagagacatgctggacgccctgggcatcacggctctgttgaatgtctcctcggactgcccaaaccactttgaaggacactatcagtacaagtgcatcccagtggaagataaccacaaggccgacatcagctcctggttcatggaagccatagagtacatcgatgccgtgaaggactgccgtgggcgcgtgctggtgcactgccaggcgggcatctcgcggtcggccaccatctgcctggcctacctgatgatgaagaaacgggtgaggctggaggaggccttcgagttcgttaagcagcgccgcagcattatctcgcccaacttcagcttcatggggcagctgctgcagttcgagtcccaggtgctggccacgtcctgtgctgcggaggctgctagcccctcgggacccctgcgggagcggggcaagacccccgccacccccacctcgcagttcgtcttcagctttccggtctccgtgggcgtgcactcggcccccagcagcctgccctacctgcacagccccatcaccacctctcccagctgttagagccgccctgggggccccagaaccagagctggctcccagcaagggtaggacgggccgcatgcgggcagaaagttgggactgagcagctgggagcaggcgaccgagctccttccccatcatttctccttggccaacgacgaggccagccagaatggcaataaggactccgaatacataataaaagcaaacagaacactccaacttagagcaataacggctgccgcagcagccagggaagaccttggtttggtttatgtgtcagtttcacttttccgatagaaatttcttacctcatttttttaagcagtaaggcttgaagtgatgaaacccacagatcctagcaaatgtgcccaaccagctttactaaagggggaggaagggagggcaaagggatgagaagacaagtttcccagaagtgcctggttctgtgtacttgtccctttgttgtcgttgttgtagttaaaggaatttcattttttaaaagaaatcttcgaaggtgtggttttcatttctcagtcaccaacagatgaataattatgcttaataataaagtatttattaagactttcttcagagtatgaaagtacaaaaagtctagttacagtggatttagaatatatttatgttgatgtcaaacagctgagcaccgtagcatgcagatgtcaaggcagttaggaagaattaggtttgaattgctttttaaaaaaaa

SEQ ID NO: 802 - DNA, 3115 bp, Homo sapiens
cgtccgcggacgcgtgggctcatcttgagaagcaggcgggttgggtgggaggaggaagaaagggaagaattaggtttgaattgcttttttaaaaaaaaagaaaagaaaaaaaaagacagcatctcactatgttgccaaggctcatctcaagctcttgggctcaagagatcctcccacctcggcctcctgagtagctgggactgcaggtgtgtgtcatcatgaccaatgtgaattgcttttgaagctggttcatgggcatgtaggccaccgaagcaattttagaccacagtaagtcaagcttttttccctccgatgatcactgggtggttgcagcattttttgcataaacctgcctaagacttgtctatcgtctgtgatcaatatgccatattacactaaggtgctcctggaaaattgggtgcagttcaaattttcctacagcaaatcatttggcaaggccagccattggggaaaccagacaactagagataaccctgaaatgaatccttttgtaaattgaagcaccatcttttctttttttgcataaattggaggttttaattttagggcagttacctgaagtgaaatataccaacaatttcttgtgttctttaaattcctagttaggtgaatatttttgaaggtcctcttttgaataaagaggggaatggacaccacatttcaggtcttctcgaagtgtggaagggcaagagagcatcagtgagctgatggtggattgcttacatcggattccattggtatgaatttcccaaactggaaatcaaagcgccagggtggggttggggctgactgctggtgagggggctggccgctggctcccgtgacgtgcgtcatgggcacgcaggcgccattttgaatctatcgtcggcacgtgggtgccattttgaatccttagttgggcctttctaaatggagaatggctttggagggagacacgttttctgtggggagggtttgggggggagggaggagggaacaagctacatgctattttgtttgtagtattgtggaacagtcttgttatggagtgccagcttagaggttgttgcaaacttgtctagaagtgagagcatggttttttttagccctttgagagtctacatctaatgaacattcttgctcacccataaataacgtcaagcctcaatgtcaccgtcacgttgggatactctttctcatctggcatcctagacaggacaaggttggttacctttccttccatgaaccatgaacctgtgacggcatcattcatcctgacttcaccaagctccgcctgtgggtgaggccagagctcccactggcaatttttagaagagccagaggctccctgcttcctctagaaataacagttcagggtgaagcatggagggtttcagttcccagacaatggaaccatttagagacaacacagttggacatttccactttttccttgattcctggaagtccagtgggttctgcagctgaaaaagccctgggtcccagcagcagagagacaggacagaggggatgcttgggcggggagggacggtaacctgcagaacagattccatttttatagaacgagtacacgtttgctaaaacagtcctgctttcccagactggattcccaccacagggacagtcggaactcaggactagctccagcgacatctttcctccgaattcaagccttctatcacaatgtcaaaacagctatttataaagccattttcattgtacttgataacagcacgagtcccaaaacttttagaaataaaataggacattggcttgattgaaaagagggactttttaaaaattgttctttcgtcagaagccttttggatgacttacaatagctctgatgaagataccaccccagcgtcagtccaataggtcagtgagtttcaacaggcatccatccctcccatgaagggattctggtgaggggaagtttctgtaatgacaggaaagcattgaccctcattgattgtcaactttggtattagccatgaaagacaggatgctcattgggtgttctgtagagtgaggaatgctgcctattccctcccagaacgtctgacccaggggtgtgtgttgaggagccctgggggaaatggaccaagttttcccacagagcagtattaggctgaagagcaggtgactggtaggccccagctcccatcattccctcccaaagccattttgttcagttgctcatccacgctggattccagagagttttccaatttgggaagccatgagaaaggtttttaaatcttgggaagatggagagagggacataggatagttgactccaacatgacaggaagaggctggagattgggaattggccatcaaccaagcctgtagtagtaaagccatggtcccgcattggaattacttggggaacttatacagttctgatacccaggctctcctagaccagttcaaccaattctaggtgggggactcaggcatcagtgtgtttcgtagctccccgggtgttttccctgtgcagccgagcttgggaaactgccatgctttttggatgtcaaggcgctgttggaggctgggtgtgacagcacagagccaggttgtcttgtggaaaccacagccacgggtttgccactggctcagcatggcctcactgccagtcccagcctggctgagggacaagatggtttctcttgggagttcctgagtggagcacccttccaggctttttgaaagccagctgatctgtggagccttgttaagggactcaatacggtgtttggatattgatgtttttccttgagactgtcttgtccatcaataaagatggaggatgtctcctctttgaaccccgcttccccaccagtactctctctcccttagagtttatgagttattcaaggaggagacttcttaaagacagcaacgcaattcttgtaacttgtgtaaatagccccatctttcagagtgataccatttctacatttgataatgcctgtattcctgtaggatgtatatagtttaggggattttttttttgtttggttttgttttttagaagtcaatatgtctggttttatttattgcttgaaaaagatcatttgaaaaaaataaa

SEQ ID NO: 803 - DNA, 1238 bp, Homo sapiens
cccgggttctcttctcttcctcgcgcgcccagccgcctcggttcccggcgaccatggtgacgatggaggagctgcgggagatggactgcagtgtgctcaaaaggctgatgaaccgggacgagaatggcggcggcgcgggcggcagcggcagccacggcaccctggggctgccgagcggcggcaagtgcctgctgctggactgcagaccgttcctggcgcacagcgcgggctacatcctaggttcggtcaacgtgcgctgtaacaccatcgtgcggcggcgggctaagggctccgtgagcctggagcagatcctgcccgccgaggaggaggtacgcgcccgcttgcgctccggcctctactcggcggtcatcgtctacgacgagcgcagcccgcgcgccgagagcctccgcgaggacagcaccgtgtcgctggtggtgcaggcgctgcgccgcaacgccgagcgcaccgacatctgcctgctcaaaggcggctatgagaggttttcctccgagtacccagaattctgttctaaaaccaaggccctggcagccatcccacccccggttccccccagcgccacagagcccttggacctggactgcagctcctgtgggaccccactacacgaccaggagggtcctgtggagatccttcccttcctctacctcggcagtgcctaccatgctgcccggagagacatgctggacgccctgggcatcacggctctgttgaatgtctcctcggactgcccaaaccactttgaaggacactatcagtacaagtgcatcccagtggaagataaccacaaggccgacatcagctcctggttcatggaagccatagagtacatcgatgccgtgaaggactgccgtgggcgcgtgctggtgcactgccaggcgggcatctcgcggtcggccaccatctgcctggcctacctgatgatgaagaaacgggtgaggctggaggaggccttcgagttcgttaagcagcgccgcagcatcatctcgcccaacttcagcttcatggggcagctgctgcagttcgagtcccaggtgctggccacgtcctgtgctgcggaggctgctagcccctcgggacccctgggggagcggggcaagacccccgccacccccacctcgcagttcgtcttcagctttccggtctccgtgggcgtgcactcggcccccagcagcctgccctacctgcacagccccatcaccacctctcccagctgttag

SEQ ID NO: 804 - DNA, 4637 bp, Homo sapiens
ggtacgcgcccgcttgcgctccggcctctactcggcggtcatcgtctacgacgagcgcagcccgcgcgccgagagcctccgcgaggacagcaccgtgtcgctggtggtgcaggcgctgcgccgcaacgccgagcgcaccgacatctgcctgctcaaaggcggctatgagaggttttcctccgagtacccagaattctgttctaaaaccaaggccctggcagccatcccacccccggttccccccagtgccacagagcccttggacctgggctgcagctcctgtgggaccccactacacgaccaggggggtcctgtggagatccttcccttcctctacctcggcagtgcctaccatgctgcccggagagacatgctggacgccctgggcatcacggctctgttgaatgtctcctcggactgcccaaaccactttgaaggacactatcagtacaagtgcatcccagtggaagataaccacaaggccgacatcagctcctggttcatggaagccatagagtacatcgatgccgtgaaggactgccgtgggcgcgtgctggtgcactgccaggcgggcatctcgcggtcggccaccatctgcctggcctacctgatgatgaagaaacgggtgaggctggaggaggccttcgagttcgttaagcagcgccgcagcattatctcgcccaacttcagcttcatggggcagctgctgcagttcgagtcccaggtgctggccacgtcctgtgctgcggaggctgctagcccctcgggacccctgcgggagcggggcaagacccccgccacccccacctcgcagttcgtcttcagctttccggtctccgtgggcgtgcactcggcccccagcagcctgccctacctgcacagccccatcaccacctctcccagctgttagagccgccctgggggccccagaaccagagctggctcccagcaagggtaggacgggccgcatgcgggcagaaagttgggactgagcagctgggagcaggcgaccgagctccttccccatcatttctccttggccaacgacgaggccagccagaatggcaataaggactccgaatacataataaaagcaaacagaacactccaacttagagcaataacggctgccgcagcagccagggaagaccttggtttggtttatgtgtcagtttcacttttccgatagaaatttcttacctcatttttttaagcagtaaggcttgaagtgatgaaacccacagatcctagcaaatgtgcccaaccagctttactaaagggggaggaagggagggcaaagggatgagaagacaagtttcccagaagtgcctggttctgtgtacttgtccctttgttgtcgttgttgtagttaaaggaatttcattttttaaaagaaatcttcgaaggtgtggttttcatttctcagtcaccaacagatgaataattatgcttaataataaagtatttattaagactttcttcagagtatgaaagtacaaaaagtctagttacagtggatttagaatatatttatgttgatgtcaaacagctgagcaccgtagcatgcagatgtcaaggcagttaggaagaattaggtttgaattgcttttttaaaaaaaaagaaaagaaaaaaaaagacagcatctcactatgttgccaaggctcatctcaagctcttgggctcaagagatcctcccacctcggcctcctgagtagctgggactgcaggtgtgtgtcatcatgaccaatgtgaattgcttttgaagctggttcatgggcatgtaggccaccgaagcaattttagaccacagtaagtcaagcttttttccctccgatgatcactgggtggttgcagcattttttgcataaacctgcctaagacttgtctatcgtctgtgatcaatatgccatattacactaaggtgctcctggaaaattgggtgcagttcaaattttcctacagcaaatcatttggcaaggccagccattggggaaaccagacaactagagataaccctgaaatgaatccttttgtaaattgaagcaccatcttttctttttttgcataaattggaggttttaattttagggcagttacctgaagtgaaatataccaacaatttcttgtgttctttaaattcctagttaggtgaatatttttgaaggtcctcttttgaataaagaggggaatggacaccacatttcaggtcttctcgaagtgtggaagggcaagagagcatcagtgagctgatggtggattgcttacatcggattccattggtatgaatttcccaaactggaaatcaaagcgccagggtggggttggggctgactgctggtgagggggctggccgctggctcccgtgacgtgcgtcatgggcacgcaggcgccattttgaatctatcgtcggcacgtgggtgccattttgaatccttagttgggcctttctaaatggagaatggctttggagggagacacgttttctgtggggagggtttgggggggagggaggagggaacaagctacatgctattttgtttgtagtattgtggaacagtcttgttatggagtgccagcttagaggttgttgcaaacttgtctagaagtgagagcatggttttttttagccctttgagagtctacatctaatgaacattcttgctcacccataaataacgtcaagcctcaatgtcaccgtcacgttgggatactctttctcatctggcatcctagacaggacaaggttggttacctttccttccatgaaccatgaacctgtgacggcatcattcatcctgacttcaccaagctccgcctgtgggtgaggccagagctcccactggcaatttttagaagagccagaggctccctgcttcctctagaaataacagttcagggtgaagcatggagggtttcagttcccagacaatggaaccatttagagacaacacagttggacatttccactttttccttgattcctggaagtccagtgggttctgcagctgaaaaagccctgggtcccagcagcagagagacaggacagaggggatgcttgggcggggagggacggtaacctgcagaacagattccatttttatagaacgagtacacgtttgctaaaacagtcctgctttcccagactggattcccaccacagggacagtcggaactcaggactagctccagcgacatctttcctccgaattcaagccttctatcacaatgtcaaaacagctatttataaagccattttcattgtacttgataacagcacgagtcccaaaacttttagaaataaaataggacattggcttgattgaaaagagggactttttaaaaattgttctttcgtcagaagccttttggatgacttacaatagctctgatgaagataccaccccagcgtcagtccaataggtcagtgagtttcaacaggcatccatccctcccatgaagggattctggtgaggggaagtttctgtaatgacaggaaagcattgaccctcattgattgtcaactttggtattagccatgaaagacaggatgctcattgggtgttctgtagagtgaggaatgctgcctattccctcccagaacgtctgacccaggggtgtgtgttgaggagccctgggggaaatggaccaagttttcccacagagcagtattaggctgaagagcaggtgactggtaggccccagctcccatcattccctcccaaagccattttgttcagttgctcatccacgctggattccagagagttttccaatttgggaagccatgagaaaggtttttaaatcttgggaagatggagagagggacataggatagttgactccaacatgacaggaagaggctggagattgggaattggccatcaaccaagcctgtagtagtaaagccatggtcccgcattggaattacttggggaacttatacagttctgatacccaggctctcctagaccagttcaaccaattctaggtgggggactcaggcatcagtgtgtttcgtagctccccgggtgttttccctgtgcagccgagcttgggaaactgccatgctttttggatgtcaaggcgctgttggaggctgggtgtgacagcacagagccaggttgtcttgtggaaaccacagccacgggtttgccactggctcagcatggcctcactgccagtcccagcctggctgagggacaagatggtttctcttgggagttcctgagtggagcacccttccaggctttttgaaagccagctgatctgtggagccttgttaagggactcaatacggtgtttggatattgatgtttttccttgagactgtcttgtccatcaataaagatggaggatgtctcctctttgaaccccgcttccccaccagtactctctctcccttagagtttatgagttattcaaggaggagacttcttaaagacagcaacgcaattcttgtaacttgtgtaaatagccccatctttcagagtgataccatttctacatttgataatgcctgtattcctgtaggatgtatatagtttaggggattttttttttgtttggttttgttttttagaagtcaatatgtctggttttatttattgcttgaaaaagatcatttgaaaaaaataaa

SEQ ID NO: 805 - protein, 394 aa, Homo sapiens
MVTMEELREMDCSVLKRLMNRDENGGGAGGSGSHGTLGLPSGGKCLLLDCRPFLAHSAGYILGSVNVRCNTIVRRRAKGSVSLEQILPAEEEVRARLRSGLYSAVIVYDERSPRAESLREDSTVSLVVQALRRNAERTDICLLKGGYERFSSEYPEFCSKTKALAAIPPPVPPSATEPLDLDCSSCGTPLHDQEGPVEILPFLYLGSAYHAARRDMLDALGITALLNVSSDCPNHFEGHYQYKCIPVEDNHKADISSWFMEAIEYIDAVKDCRGRVLVHCQAGISRSATICLAYLMMKKRVRLEEAFEFVKQRRSIISPNFSFMGQLLQFESQVLATSCAAEAASPSGPLGERGKTPATPTSQFVFSFPVSVGVHSAPSSLPYLHSPITTSPSC

SEQ ID NO: 806 - protein, 302 aa, Homo sapiens
VRARLRSGLYSAVIVYDERSPRAESLREDSTVSLVVQALRRNAERTDICLLKGGYERFSSEYPEFCSKTKALAAIPPPVPPSATEPLDLGCSSCGTPLHDQGGPVEILPFLYLGSAYHAARRDMLDALGITALLNVSSDCPNHFEGHYQYKCIPVEDNHKADISSWFMEAIEYIDAVKDCRGRVLVHCQAGISRSATICLAYLMMKKRVRLEEAFEFVKQRRSIISPNFSFMGQLLQFESQVLATSCAAEAASPSGPLRERGKTPATPTSQFVFSFPVSVGVHSAPSSLPYLHSPITTSPSC

SEQ ID NO: 807 - DNA, 3829 bp, Homo sapiens
gtttgaaagtgtgtagcacctccaccttctctctctctctccctctccctctcctgccagccaagtgaagacatgcttacttccccttcaccttccttcatgatgtgggaagagtgctgcaacccagccctagccaacgccgcatgagagggagtgtgccgagggcttctgagaaggtttctctcacatctagaaagaagcgcttaagatgtggcagcccctcttcttcaagtggctcttgtcctgttgccctgggagttctcaaattgctgcagcagcctccacccagcctgaggatgacatcaatacacagaggaagaagagtcaggaaaagatgagagaagttacagactctcctgggcgaccccgagagcttaccattcctcagacttcttcacatggtgctaacagatttgttcctaaaagtaaagctctagaggccgtcaaattggcaatagaagccgggttccaccatattgattctgcacatgtttacaataatgaggagcaggttggactggccatccgaagcaagattgcagatggcagtgtgaagagagaagacatattctacacttcaaagctttggagcaattcccatcgaccagagttggtccgaccagccttggaaaggtcactgaaaaatcttcaattggactatgttgacctctatcttattcattttccagtgtctgtaaagccaggtgaggaagtgatcccaaaagatgaaaatggaaaaatactatttgacacagtggatctctgtgccacatgggaggccatggagaagtgtaaagatgcaggattggccaagtccatcggggtgtccaacttcaaccacaggctgctggagatgatcctcaacaagccagggctcaagtacaagcctgtctgcaaccaggtggaatgtcatccttacttcaaccagagaaaactgctggatttctgcaagtcaaaagacattgttctggttgcctatagtgctctgggatcccatcgagaagaaccatgggtggacccgaactccccggtgctcttggaggacccagtcctttgtgccttggcaaaaaagcacaagcgaaccccagccctgattgccctgcgctaccagctgcagcgtggggttgtggtcctggccaagagctacaatgagcagcgcatcagacagaacgtgcaggtgtttgaattccagttgacttcagaggagatgaaagccatagatggcctaaacagaaatgtgcgatatttgacccttgatatttttgctggcccccctaattatccattttctgatgaatattaacatggagggcattgcatgaggtctgccagaaggccctgcgtgtggatggtgacacagaggatggctctatgctggtgactggacacatcgcctctggttaaatctctcctgcttggcgacttcagtaagctacagctaagcccatcggccggaaaagaaagacaataattttgtttttcattttgaaaaaattaaatgctctctcctaaagattcttcacctactttggtctccataacttctatgttttctctccttctgacacactagtgcccccaaattgtgatttgcctatacgtttagggccgggattggaagatgttaacaaccatttaagattcatttctgcagtgggagtgggtggagtttcaccctctgggaaaggggcaggtgacaggtatttatcagtcagtgcctctctagctcttgtaggaagaagcacacgcaggatggagtctagaggatgagcgatattgaccagcaattcatgggctccctccagcagtgcgagggtcagagtttctggagccttgggaggaggcaaccctgtgagggggggttagggagatgggagggcaccaggaaaagtgattagaagtcaggtatgggaaggctaaataggacagagtcgagtacatctctgcttggaaaaacatatcaacaccctttttttttgatcattatatcttgttcataaaagaaaactttccacattgttttaacaaaccccacagctgagagtcaggcctgaatctttgatgtgtgcccattcacaacgttgaccctattggtttgtggtggggcaggacatcgaagatatcattgactaatcacattcccctgaatagctcatatttagaaaatattcttagattgtaaaaatgtactgttcatttgttatattcaatcttttaaatgttttatactttaaacaaggcatagttacaagtataaaacataaatatcccaaagccattatgcatggcactcaagattaaaatgggaaataatacatctaataaatcaaatgttccaagacttcaaatgtcttttggaaacaggctatgtaaaacagcacactggtttcaaactttggtaaattttaagaagaactcttacaaaggcatttaattcttatacataattttcaggggacctaagttaatcagctaatcatgaagacatgattttcgttttagaaaacacttttgaaaacttgggataatctcatgtcttaatgatcaaagcattatgagaaggacagtggttttttacctgggcacactttctaacacatttactctccactattcgtactctggtagccacgttaaccccatcagagattccttctcaagccatgtctcagagctgataggcatcccagcaagttttgcagctcacaatttttctgtaaattacttattctataaaattggaagaggccataaactttggagggccctagaccaattttttggattatttctggtctactctcattccgttgatgatcttagatattctctgcattaaatatcacctctaggctgagaaatccaccaaaaaatatttctagctcagcgttttcctccaaatcttcaatggaagatcataatgtgaactctgcatctccatgttaaagtttaatggacattcacatttagcatgtctcaaagaaatctcatgtaaaccatggccatcctgttctaccttaactttctgagtctatggaatgataatttcacatctcataaacttgactgatgtaagtgtcaagaaaagattgacattttgttaaaacttcgtagccaagtgtgtaacgcttaagcagactttcatatttcaaatctctatagcacgtgtaactcttttttcaagatgtgaaataatcattaggtcagtcatttgtaaatagtacagctgctgtgggctttttccagttcttcaccatccatttttataaaactcttattgttaaaaaaaaaaagttactcagaatttcataaagccaaacacctgatttcaggaacacttgagatgtaagaaaattttatagggacctccaatcactaattttcctattttttctctcaaagaaatgctgaagggaggaattcaggttgaatgaaaggaaatagtaacttacagccatatagagttataaagacttcttgtaaatgtgaacatatggtaaaatataaaaacatgtatttttgaaaaaatggattctactcattattttacttccatttaagatataaatgtagagaaataagtataattctaagctaatacgtacgcaatgtaggaagctgtaattactgaccaaaactatgtgaagtggagaaaacctggggaagtggatggttttagatgaaactgaagttaaattcatattgatttaaagtaaattgttataactttataaagtttttcatcatcaccacagcaatcacaaagagaataattatgaatatacgcaagaggaaatgagaagggaatccaaatgtcattaaaaaaaaa

SEQ ID NO: 808 - DNA, 781 bp, Homo sapiens
gcggcggagctgtgagccggcgactcgggtccctgaggtctggattctttctccgctactgagacacggcgggtaggtccacaggcagatccaactgggagttgaagtgtgagtgagagtgaagaggaaccagcaggcttccggagggttgtgtggtcagtgactcagagtgagaaggccctcgaagtcgtcgtccctctcatgcggtgccacgcccatggaccttcttgtctcgtcacggccataactagggaggaaggagggccgaggagtggaggggctcaggcgaagctggggtgctgttgggggtatccgagtcccagaagcacctggaaccccgacagaagattctggactccccagacgggaccaggagagggacggcatgagcgacacacacaaacacagaaccacacagccagtcccaggagcccagtaatggagagccccaaaaagaagaaccagcagctgaaagtcgggatcctacacctgggcagcagacagaagaagatcaggatacagctgagatcccagtgcgcgacatggaaggtgatctgcaagagctgcatcagtcaaacaccggggataaatctggatttgggttccggcgtcaaggtgaagataatacctaaagaggaacactgtaaaatgccagaagcaggtgaagagcaaccacaagtttaaatgaagacaagctgaaacaacgcaagctggttttatattagatatttgacttaaactatctcaataaagttttgcagctttcaccaaaaaaaaaaaa

SEQ ID NO: 809 - protein, 160 aa, Homo sapiens
MRCHAHGPSCLVTAITREEGGPRSGGAQAKLGCCWGYPSPRSTWNPDRRFWTPQTGPGEGRHERHTQTQNHTASPRSPVMESPKKKNQQLKVGILHLGSRQKKIRIQLRSQCATWKVICKSCISQTPGINLDLGSGVKVKIIPKEEHCKMPEAGEEQPQV

SEQ ID NO: 810 - DNA, 624 bp, Homo sapiens
  misc_feature 5, 74: n = A,T,C or G
atganaaggagatgacacaaaagttagatctcatcacaagtgatttggcagattaccagcagcccctcatgatnggcaccgggacagtcacgaggaagggctccaccttccggcccatggacacggatgccgaggaggcaggggtgagcaccgatgccggcggccactatgactgcccgcagcgggccggccgccacgagtacgcgctgcccctggcgcccccggagcccgagtacgccacgcccatcgtggagcggcacgtgctgcgcgcccacacgttctctgcgcagagcggctaccgcgtcccagggccccagcccggccacaaacactccctctcctcgggcggcttctcccccgtagcgggtgtgggcgcccaggacggagactatcaaaggccacacagcgcacagcctgcggacaggggctacgaccggcccaaagctgtcagcgccctcgccaccgaaagcggacaccctgactctcagaagcccccaacgcatcccgggacaagtgacagctattctgcccccagagactgcctcacacccctcaaccagacggccatgactgcccttttgtgaacacaatgtgaaagaagcctgctgtggtactgagcgtcgg

SEQ ID NO: 811 - DNA, 572 bp, Homo sapiens
agcgggctgtgaggacgctctgggccaggctgcagcgcgagcgttccgagctgctgggctctttcgaggatgttctgatacgcgcgtcggcctgcctggaggaggcggcccgggagcgcgacggcctggagcaggcgctgcggaggcgcgagagcgagcacgagagggaggtgcgcgctctgtacgaggagacggagcagcttcgggagcagagccggcgcccgccgagtcagaacttcgcccgcggggagcggagaagccgtctggagctggagctgcagatccgcgagcaggacctggaacgcgcgggcctgcggcagcgggagttagagcagcagctgcacgcccaggctgcggagcacctggaggcacaggcccagaactcccagctgtggcgggcgcacgaggcgctgcgaacgcagctggagggggcgcaggagcagatccgcaggctggagagcgaagcacgaggccgccaggagcaaacccaacgagacgtggtcgccgtctccaggaacatgcagaaagagaaagtcagcctgctacggcaactggagctgctcagggagctg

SEQ ID NO: 812 - DNA, 594 bp, Homo sapiens
  misc_feature 45: n = A,T,C or G
cggaagttggcgcagcgcggttgccaatggtcgctccctgatttnatgccgctcgtggtgttttgcgggctgccgtacagcggcaagagccggcgtgctgaagagttgcgcgtggcgctggctgccgagggccgcgcggtgtacgtggtggacgacgcagctgtcctgggcgcagaggacccagcggtgtacggcgattctgcccgtgagaaggcattgcgtggagctctgcgagcctccgtggaacggcgcctgagtcgccacgacgtggtcatcctggactcgcttaactacatcaaaggtttccgttacgagctctactgcctggcacgggcggcgcgcaccccgctctgcctggtctactgcgtacggcccggcggcccgatcgcgggacctcaggtggcgggcgcgaacgagaaccctggccggaacgtcagtgtgagttggcggccacgcgctgaggaggacgggagagcccaggcggcgggcagcagcgtcctcagggaactgcatactgcggactctgtagtaaatggaagtgcccaggccgacgtacccaaggaactggagcgagaagaatccggggctgcggag

SEQ ID NO: 813 - DNA, 561 bp, Homo sapiens
  misc_feature 121, 352, 368, 440, 445, 486, 497, 516, 528, 540, 550, 552: n = A,T,C or G
tctgacacacgagaccggttatcccatctccgcgcccctctgtgggtattacacagccactagatgaagccaaacattgttggaggtactgaaatcttagactccaccatgtgtccaggancccattgacgtcctctcttctgaaaactccgtgtggccctcgctctgcactgtcatgaggcggtgatggagctagatacccaccacggacaatgatcatcagtttggggttctctgggtctcacagggacgcacattctaggggtagcacgacactccccctgtagttgctccacacaaacgggatctctcatccaggcgatacgtctggtcctgtggcatgtggctctcnacgaaacaccagggangcattatgttggggacttcttggggctctgctggtctctgctccagacacgattaatccgaaatgtgttaantcgancacatgggtccacgtccaggacagctcccatcgaactctcnaggctctctanctcagggatgaaggaggtnaagtgatcgatnctcacaagcganagctctcgcncnatatctgcg

SEQ ID NO: 814 - DNA, 307 bp, Homo sapiens
  misc_feature 2, 6, 9, 24, 26, 45, 46, 63, 64, 73, 81, 82, 91, 95, 138,148, 151, 188, 205, 206, 212, 223, 229, 234, 242, 245, 248,252, 258, 262, 270, 278, 280, 301: n = A,T,C or G
cntcgnggngttggttgtgtgggntnttctcgggtgattgggtgnnattactggacccaaccnncgtggaaanggctgggnncgcggccgntctngcagaagtatcccgatttttttttttttttttttttttttggnggagggaaanttncagacatagctttattgctgactcctgcccccttcanagccctagtcacaggcnncagggntgttttgtaanttaaantttcnggaaaatnggngtntttntgcatncaanagaagggntgccaaangnggggtattgcttctgggtggnttaccc

SEQ ID NO: 815 - DNA, 784 bp, Homo sapiens
  misc_feature 596, 656, 727, 763, 768: n = A,T,C or G
ggcacgagatataatcagactcttactcctgtacttctagaaatgatgcaaacacttcaaggacccacaaatgtggaagatatgaatgcactgttaatcaaagatgctgtgtataatgctgttggattaagctgcttatgagctctttgacagtgttgattttgatcagtggtttaaaaaccagcttcttccagaattacaagtcattcacaataggtataagccattgcgacgcagggtgatttggctcatcggtcagtggatttctgtgaaattcaagtctgacttaagacccatgctttatgaagcaatctgtaacttgcttcaagatcaagatttagtggccgtattgaaacagctacaactttgaagttaactgttgatgattttgaatttagaacagatcagtttctaccgtatttggaaaccatgttcacactactttttcagttactgcagcaagttacagaatgtgacacaaagatgcatgttttgcatgtcctttcttgtgtgatcgaaagagtcaacatgcagatacgaccatatgtgggatgtttggtacaatatttgcccctcctttggaagcagaagtgaanaacacaatatgttgagatgtgctattttgaccacacttattcatcttggtcagggattangagcagacagcaagacctgtccctttcctgctccagttattcactgagtaccagatgtttcacagccttcncatgtttatttttctggaaaatgggttaaaaatatnggtangaacctttgggaaaac

SEQ ID NO: 816 - DNA, 813 bp, Homo sapiens
  misc_feature 740, 788, 790, 798, 811: n = A,T,C or G
ggcacgagcaggctgggaagaagtccttgcttctcaaggccacgtaccggccgcgtccttccacccttgccctttaaaccacagatgccaaatgatacgccaacagacactacattccccagcagctgctgccagagccctcttgtagcttctttattttctgtttctttccagctttcctaccctcctatccccccttgtgtttgggccacaattttgaaataatttttattataggtatgtgctgccaaagccagatttttataaggtaaaataaattaagaatttaaacagtaaaagccagtgtctcaaaatgtcagcattaaaatgtgaaggggacagcagggtgtgaaccggaaacacacattgccaaacagttgccaactgaactgctgcttctcatggtccgttcttttctttgcccttaaggtcaatgccagtgtccagacgagcagtgtagaaaagctccctgtgtggtttgtcgtgaggtctgcttgtatctcttcactggcgttagtttcattagctctttattctccttacgttcgagtgaatctgccaagaacactggtggatagtattatcctaacacttttggtttgggggcggggagggggcagggaatagtgagctggctttaccaccttcaggatctcgaattgggcgcttgaacctaagaaagattgtggacttatcaaaagtcaccgctcagtgttcgtcaagcatgtatttatgtgacnatcatactagggaggggatggttgggaattcttccatgtgcaaatttngncccgcaanaagcaaaactggngt

SEQ ID NO: 817 - DNA, 229 bp, Homo sapiens
  misc_feature 30, 57, 102, 112, 124, 222: n = A,T,C or G
gaaacttttacattaatgatttattaaaanaaacaactccttgtcccactccactgngctgcttgtaatctccatacatggcctccattttcaactgttttnttggtcacanagctccaaacanacacatttttttttccaggtaaaagctgtttttagtttgtagtacaaatgtgactgcatccaatactgacacattgttcctttggcccacagtcccantcaccac

SEQ ID NO: 818 - DNA, 781 bp, Homo sapiens
  misc_feature 355, 437, 539, 557, 569, 593, 608, 635, 636, 653, 654, 662,665, 674, 697, 699, 708, 724, 734, 743, 755, 763, 764, 769,775: n = A,T,C or G
ggcacgaggtgtgtgtgtgtgtgtgtgtgtaacacatgggcattggtccttccaggacaacttggttagggctccagggtggcctctcaggcaggaacaggcttttttcctcctgtcttttcctcacatcacgtcctgccccaggtcactgcataaataagtgctttggaaagtattcatctagaaagtaacataaatactgtacatagaaaagggttgccgccccttagccttcgcactgccccagagagctctccacatattgcacacggcctccccagccctgtggggtccaggcctggctgtgtctttggtagaagcttcagggacagttcctgggcagcccccacatctncaccctgctcccaaaggggagctctagggtagtcagtgggtaccagaagccttgctcggcctcgctggtggccttctaccanggatgctttcacaaggatgagacagaatcccaatggtatgcccctgcttggacactctgctcaaggtctgcatgtggcctgggaggagacaggcaggctganggcaggtggacaggtgantcctggccacanaaggcaggctcacacccttcacangaataggtggtttgngctgtcatctcggcccacggtctcctnntgcgccacccccccttnntgaatcgnaantcctcaaancccttaccaccacttgatgaccnancatttttanggcctggcttgaaggngggggccttnggccccccnaagggggaaatncccccggnngaatncccaanggggaa

SEQ ID NO: 819 - DNA, 199 bp, Homo sapiens
  misc_feature 2, 3, 4, 12, 20, 21, 22, 36, 37, 49, 76, 80, 83, 88, 157,165, 167, 177: n = A,T,C or G
cnnngtggaaanggctgggnnngcggccgttttcgnngtagtatcgcgnttttttttttttttttgtgggaggttntgcngtntttgnttgctctctcaaattccaggaattgacttatttaattaatgcctgcaacctgtgctagcaaatatttgnacaaaacnanttgtgttggngatgttcttttgggtcgggcag

SEQ ID NO: 820 - DNA, 211 bp, Homo sapiens
  misc_feature 1, 2, 3, 128, 131, 150, 157, 159, 166, 172, 174, 180, 182,185, 192, 202, 206: n = A,T,C or G
nnnggcacgaggagagagagagagagagagagagagagagagagagagagagagagagagagagagagagagagagagagagagagagagagagagagagagagagagagagagagagagagacagtnctntgtgtgtctctctgtctcnaagtacncnctgaggnatctgntntctgtntntgngtacacngtatctctcntggncatat

SEQ ID NO: 821 - DNA, 952 bp, Homo sapiens
  misc_feature 1, 2, 3, 29, 688, 692, 702, 742, 749, 767, 774, 786, 805,815, 828, 835, 840, 842, 854, 864, 868, 871, 879, 889, 890,895, 900, 904, 909, 912, 915, 926, 939, 944, 947: n = A,T,C or G
nnntcaggctcctggatgagccctgcganagagggtggcagcacggagagagctgctggaggcagcagagcaccaaggaaacatccagacatgcgcggcccggcccatccgctcccggaacagcaccaagacgaaatgggaaactacatgtccccaggttcgaggctgcaggggcagactctggtgtgaacaggggggatgtgaccacctaaggaaaaggtcacacctgtcttggtatcaggggctcaagagctctcaaaaatgtaaggggccgacagtcccctgccccaggcctgatcacaactccagggtcatgaggtcagagtaaagtgcagaggtttttaaacataaccaaaatttcaggagaggccaattcttacttgaaagagcaacaccctggggcgctgcttgccattacttcctcatctttagcaacacatttgcttttcaaggtgttccttgtggaaacacacatacacatagacacatgcccctcagatgtcccctgccccctgattagtagaatgtggggtttccacaatgagcagaaactgatccaattttggttaagtttgagaagccctctgaatttgggtggttggcccaatgtaaatacttccgcagagatggagggcattcaaaacaggttctgaaaggatccagcctatcttggactttgttctggaanccanggattcagcnttggccacctgtgccaggcttgcaaggcctggtgtgaacncccaaantggcagcaaaaacaacanacagccnctgcactttggntggaccaacgtttggcctnaacaaatctngcgggttgggatnttcttgntttcncncccaggggaccnaaaacccccntacntgnaataaccntttttttttnnaaccntttanccantgggnttnccnaaaaaacttgnccccttttttttnccaanggnaaaat

SEQ ID NO: 822 - DNA, 587 bp, Homo sapiens
  misc_feature 264, 335, 366, 371, 410, 413, 416, 424, 438, 464, 477, 478,497, 502, 509, 540, 575, 577, 581: n = A,T,C or G
ggcacgagaactagtctcgagttttttttttttttttttaacatttctgaattttattatttttagggaagacacgcagtttcacaagaaacaatgatttttctcaaacaatagaaaaaaaggtctttttgaaaaatccactgtcttagatgaaaagtctacccagcaagcactggggcagttctgagagtagaaaccagtgtggtggaagttacttataggaagttcagtgcagaggtctccacaagtcctgattagttctgnaaggctccattgggccagctcagggtaacagtgggaatgagctcacagacaaaggcaggcaccagttcctntgcccgggatgcaggctggctcactccccangcggntgcatcttgcttcagactcatcaaactgctgctgtccanctncgncatgactntgttgagaacatanaactctgctctctggctttgcttcanctcctggtgggcnnaattctgcttagccttctncactntgaaggntgggtctttaacttttggatttttttttccnggcagggggaaccatgaatggggtacatacccacncngggntttggc

SEQ ID NO: 823 - DNA, 264 bp, Homo sapiens
  misc_feature 1, 4, 7, 15, 17, 35, 38, 44, 53, 90, 105, 108, 115, 117,121, 126, 128, 158, 176, 178, 184, 201, 221, 227, 229, 233,239, 250: n = A,T,C or G
ntcnatncctactangncaaactgactccgccctnagncacctngtggtccanggctgcggagctgcgatacagccttccgcgggtctgntggaaccccgacctntcntggtgtntntccntcccncnccccaacccgccaagggcctgcctttcctnctgggcctttgccagcgntnggccanaccggggccaaaccggnccccgggcacattttaaccnagggcncncttntagaanaaaaccccggntgatgttataaagg

SEQ ID NO: 824 - DNA, 520 bp, Homo sapiens
  misc_feature 7, 15, 17, 39, 60, 81, 98, 101, 110, 111, 138, 145, 174,222, 250, 262, 311, 318, 332, 336, 345, 378, 406, 411, 414,421, 426, 439, 447, 448, 450, 474, 479, 489, 494, 498, 505,508, 510: n = A,T,C or G
tcaagcngcccccantntgatggatatctgcaaaattcnccctttcaccggccgcccgcngcatgtcttattatacaacanatccaacttccctaagnggntcacacatnntaaggtattgttaacaaaataggaaantctattngaactaacaatcatctctttgaatctgcntatcccattaaaagcattttcctcaatattcctcatatcggttatggncaatggatacccatctgagctggttganccctttaaattnattatacttaactttttgaaggctgttatacccaagggacaaacctaancaaccancagatatacttganggtntctcctgtnatttctcagattccaatataccattttgccttnacacctacagcccttaggggcatcctcnttccncanaacaaancattntcactaagacagnctggggtnntncaccaatggctaccaaacctctgnccgcnacccaccgcntaaanggcngaaattnccnanccacacgggt

SEQ ID NO: 825 - DNA, 2064 bp, Homo sapiens
cggtgcgctgagcgccggaggagcgtaggcagggcagcgctggcgccagtggcgacaggagccgcgcgaccggcaaaaatacacgggaggccgtcgccgaaaagagtccgcggtcctctctcgtaaacacactctcctccaccggcgcctccccctccgctctgcgcgccgcccggctgggcgcccgaggccgctccgactgctatgtgaccgcgaggctgcgggaggaaggggacagggaagaagaggctctcccgcgggagcccttgaggaccaagtttgcggccacttctgcaggcgtcccttcttagctctcgcccgcccctttctgcagcctaggcggcccgggttctcttctcttcctcgcgcgcccagccgcctcggttcccggcgaccatggtgacgatggaggagctgcgggagatggactgcagtgtgctcaaaaggctgatgaaccgggacgagaatggcggcggcgcgggcggcagcggcagccacggcaccctggggctgccgagcggcggcaagtgcctgctgctggactgcagaccgttcctggcgcacagcgcgggctacatcctaggttcggtcaacgtgcgctgtaacaccatcgtgcggcggcgggctaagggctccgtgagcctggagcagatcctgcccgccgaggaggaggtacgcgcccgcttgcgctccggcctctactcggcggtcatcgtctacgacgagcgcagcccgcgcgccgagagcctccgcgaggacagcaccgtgtcgctggtggtgcaggcgctgcgccgcaacgccgagcgcaccgacatctgcctgctcaaaggcggctatgagaggttttcctccgagtacccagaattctgttctaaaaccaaggccctggcagccatcccacccccggttccccccagtgccacagagcccttggacctgggctgcagctcctgtgggaccccactacacgaccaggggggtcctgtggagatccttcccttcctctacctcggcagtgcctaccatgctgcccggagagacatgctggacgccctgggcatcacggctctgttgaatgtctcctcggactgcccaaaccactttgaaggacactatcagtacaagtgcatcccagtggaagataaccacaaggccgacatcagctcctggttcatggaagccatagagtacatcgatgccgtgaaggactgccgtgggcgcgtgctggtgcactgccaggcgggcatctcgcggtcggccaccatctgcctggcctacctgatgatgaagaaacgggtgaggctggaggaggccttcgagttcgttaagcagcgccgcagcatcatctcgcccaacttcagcttcatggggcagctgctgcagttcgagtcccaggtgctggccacgtcctgtgctgcggaggctgctagcccctcgggacccctgcgggagcggggcaagacccccgccacccccacctcgcagttcgtcttcagctttccggtctccgtgggcgtgcactcggcccccagcagcctgccctacctgcacagccccatcaccacctctcccagctgttagagccgccctgggggccccagaaccagagctggctcccagcaagggtaggacgggccgcatgcgggcagaaagttgggactgagcagctgggagcaggcgaccgagctccttccccatcatttctccttggccaacgacgaggccagccagaatggcaataaggactccgaatacataataaaagcaaacagaacactccaacttagagcaataacggctgccgcagcagccagggaagaccttggtttggtttatgtgtcagtttcacttttccgatagaaatttcttacctcatttttttaagcagtaaggcttgaagtgatgaaacccacagatcctagcaaatgtgcccaaccagctttactaaagggggaggaagggagggcaaagggatgagaagacaagtttcccagaagtgcctggttctgtgtacttgtccctttgttgtcgttgttgtagttaaaggaatttcattttttaaaa

SEQ ID NO: 826 - DNA, 2109 bp, Homo sapiens
tggcgccagcggcgacaggagccgcgcgaccggcaaaaatacacgggaggccgtcgccgaaaagagtccgcggtcctctctcgtaaacacactctcctccaccggcgcctccccctccgctctgcgcgccgcccggctgggcgcccgaggccgctccgactgctatgtgaccgcgaggctgcgggaggaaggggacagggaagaagaggctctcccgcgggagcccttgaggaccaagtttgcggccacttctgcaggcgtcccttcttagctctcgcctgcccctttctgcagcctaggcggcccaggttctcttctcttcctcgcgcgcccagccgcctcggttcccggcgaccatggtgacgatggaggagctgcgggagatggactgcagtgtgctcaaaaggctgatgaaccgggacgagaatggcggcggcgcgggcggcagcggcagccacggcaccctggggctgccgagcggcggcaagtgcctgctgctggactgcagaccgttcctggcgcacagcgcgggctacatcctaggttcggtcaacgtgcgctgtaacaccatcgtgcggcggcgggctaagggctccgtgagcctggagcagatcctgcccgccgaggaggaggtacgcgcccgcttgcgctccggcctctactcggcggtcatcgtctacgacgagcgcagcccgcgcgccgagagcctccgcgaggacagcaccgtgtcgctggtggtgcaggcgctgcgccgcaacgccgagcgcaccgacatctgcctgctcaaaggcggctatgagaggttttcctccgagtacccagaattctgttctaaaaccaaggccctggcagccatcccacccccggttccccccagcgccacagagcccttggacctgggctgcagctcctgtgggaccccactacacgaccaggggggtcctgtggagatccttcccttcctctacctcggcagtgcctaccatgctgcccggagagacatgctggacgccctgggcatcacggctctgttgaatgtctcctcggactgcccaaaccactttgaaggacactatcagtacaagtgcatcccagtggaagataaccacaaggccgacatcagctcctggttcatggaagccatagagtacatcgatgccgtgaaggactgccgtgggcgcgtgctggtgcactgccaggcgggcatctcgcggtcggccaccatctgcctggcctacctgatgatgaagaaacgggtgaggctggaggaggccttcgagttcgttaagcagcgccgcagcatcatctcgcccaacttcagcttcatggggcagctgctgcagttcgagtcccaggtgctggccacgtcctgtgctgcggaggctgctagcccctcgggacccctgcgggagcggggcaagacccccgccacccccacctcgcagttcgtcttcagctttccggtctccgtgggcgtgcactcggcccccagcagcctgccctacctgcacagccccatcaccacctctcccagctgttagagccgccctgggggccccagaaccagagctggctcccagcaagggtaggacgggccgcatgcgggcagaaagttgggactgagcagctgggagcaggcgaccgagctccttccccatcatttctccttggccaacgacgaggccagccagaatggcaataaggactccgaatacataataaaagcaaacagaacactccaacttagagcaataacggctgccgcagcagccagggaagaccttggtttggtttatgtgtcagtttcacttttccgatagaaatttcttacctcatttttttaagcagtaaggcttgaagtgatgaaacccacagatcctagcaaatgtgcccaaccagctttactaaagggggaggaagggagggcaaagggatgagaagacaagtttcccagaagtgcctggttctgtgtacttgtccctttgttgtcgttgttgtagttaaaggaatttcattttttaaaagaaatcttcgaaggtgtggttttcatttctcagtcaccaacagatgaataattatgcttaataataaagtatttattaagacttt

SEQ ID NO: 827 - protein, 394 aa, Homo sapiens
MVTMEELREMDCSVLKRLMNRDENGGGAGGSGSHGTLGLPSGGKCLLLDCRPFLAHSAGYILGSVNVRCNTIVRRRAKGSVSLEQILPAEEEVRARLRSGLYSAVIVYDERSPRAESLREDSTVSLVVQALRRNAERTDICLLKGGYERFSSEYPEFCSKTKALAAIPPPVPPSATEPLDLGCSSCGTPLHDQGGPVEILPFLYLGSAYHAARRDMLDALGITALLNVSSDCPNHFEGHYQYKCIPVEDNHKADISSWFMEAIEYIDAVKDCRGRVLVHCQAGISRSATICLAYLMMKKRVRLEEAFEFVKQRRSIISPNFSFMGQLLQFESQVLATSCAAEAASPSGPLRERGKTPATPTSQFVFSFPVSVGVHSAPSSLPYLHSPITTSPSC

SEQ ID NO: 828 - DNA, 453 bp, Homo sapiens
ggatcatttaattgcatactctatgaccacgcacatgtaaagccccttctgcaaaagagacctaaaccagatgagaagtattattcatccagcatatggggaccaacatgtgatggcctcgatcggattgttgagcgctgtgacctgcctgaaatgcatgtgggtgattggatgctctttgaaaacatgggcgcttacactgttgctgctgcctctacgttcaatggcttccagaggccgacgatctactatgtgatgtcagggcctgcgtggcaactcatgcagcaattccagaaccccgacttcccacccgaagtagaggaacaggatgccagcaccctgcctgtgtcttgtgcctgggagagtgggatgaaacgccacagagcagcctgtgcttcggctagtattaatgtgtagatagcactctggtagctgttaactgcaagtttagct

SEQ ID NO: 829 - DNA, 452 bp, Homo sapiens
ctgggccacgaggacaccaccagcttggatcggcctcgccgtgtggaatactttgtagataagcaactccaagtaaaggctgtcacctgtgggccgtggaacacctacgtgtatgctgtggagaaagggaagagctgacatgtgtacgtatatgtatatgcaacacctgtgagacccccattcaggtcaaggaaaaccgttgcctgcaccccaagggccccatatttgcccctccccatcacagtcctgcccttcaccctcaagcacggtcctaaacttgtctgcactttagaaacacctggagagcattgaaaactctgctgcctaaggtcagcatcaatcaaaacaatgaaatcaatgaaacaatgaaaccagagcttctaggtgtgtggcctggatagtggtagattcaaagctccacccacctcatcccaggtacatttgatgtgcag

SEQ ID NO: 830 - DNA, 450 bp, Homo sapiens
ctgacccccctttgtccacagctaagatggcagcagaatgctatgtcactatatacagaaacaagacaacctgaagctaaatggatgccccctgcagagtcaacaggtccagcctcacagtgcacgccctgagctacagcctctcccaaaaggcatcttccccacagcctcaacgccgagcaaggagcatcaagggtttgtctcggttgttttgttctttttacaaactatagatatatacagttgaaaactcaggatttctagccaataaccatagttaccaccaccttacaaataaaaagaaaatgccagaaacatctttaaatgccttgtcacaccaacagcaaagtgcacagagtgaggagaacacgagagtgccttttcattttaaaaatgtttggaaatatgtacaactttgatacagtttcagggtgctccagacacccatgg

SEQ ID NO: 831 - DNA, 395 bp, Homo sapiens
ctctaaacccctccacattcccgcggtccttcagactgcccggagagcgcgctctgcctgccgcctgcctgcctgccactgagggttcccagcaccatgagggcctggatcttctttctcctttgcctggccgggagggccttggcagcccctcagcaagaagccctgcctgatgagacagaggtggtggaagaaactgtggcagaggtgactgaggtatctgtgggagctaatcctgtccaggtggaagtaggagaatttgatgatggtgcagaggaaaccgaagaggaggtggtggcggaaaatccctgccagaaccaccactgcaaacacggcaaggtgtgcgagctggatgagaacaacacccccatgtgcgtgtgccaggaccccaccag

SEQ ID NO: 832 - DNA, 291 bp, Homo sapiens
ctgactcttccatctgtgcaggttgactgaggtcattcctgagttgcagtatgttgagagggtaatatttctgtcttctctaactccccatactcccttgtcttccactctccacttaggagttttttgtgagttatgtccttgttgcttttgcctctttttctttctagccttgattgtgccagaagacaatgtccctattcacacactctttctgcttttctgtgggcaggaacatggaaggggtgctgatggacgtggactgtgagagcgtctaccccactgtgtagg

SEQ ID NO: 833 - DNA, 491 bp, Homo sapiens
ctgtagcttctgtgggacttccactgctcaggcgtcaggctcaggtagctgctggccgcgtacttgttgttgctttgtttggagggtgtggtggtctccactcccgccttgacggggctgctatctgccttccaggccactgtcacggcttccgggtagaagtcacttatgagacacaccagtgtggccttgttggcttgaagctcctcagaggagggcgggaacagagtgaccgagggggcagccttgggctgacctaggacggtcagcttggtccctccgccgaagaccacattattgccgtcccacgtctgacagtaatagtcagcctcatccatagcctgggtcccgctgatggtcagagtggctgtgttcccagagttggagccagagaagcgctcagggatccctgaagaccgcttattatcttgataaatgactaccacaggggactggcctggcttctgttgataccaacaagcagatacctg

SEQ ID NO: 834 - DNA, 308 bp, Homo sapiens
ctggtcgaggtccacgccgcggtaggtgaacttgcggaaggtccgcttcttcttctgctctacttctgccgtgctggagaacatcgaactgaacaagaagagtatgtattcccgtgtgccagagtgccaggtcaccacatactattatgttgggttcgcatatttgatgatgcgtcgttaccaggatgccatccgggtcttcgccaacatcctcctctacatccagaggaccaagagcatgttccagaggaccacgtacaagtatgagatgattaacaagcagaatgagcagatgcatgcgctgctgg

SEQ ID NO: 835 - DNA, 472 bp, Homo sapiens
  misc_feature 365, 402, 406: n = A,T,C or G
ctgacatgttaactgtgatgcataaaactcgatcttctgatggggagtaagtgcagaaggtagaaatctccgccccgcgggggcttatctgtactggtagttcatgctgtggtctgcgtttctgccatagccgccttgtgaggactggtaggagctgggagggccactgtagttctggccggaccccggggagttgtagttcgactgtgagtagcctccttgtttgccttggtatgaggagccgcccccagaacctccgccgtagcccccgtgtgaccctgggttgtaggatgccccgcctgagccgtagctgttcccgccgcttcggcctccactaccactgtagttgaatttgctctcgtagntgtagtcggatccgcccccgcccccgggagagttgtngganttcgagtaggagtagctgccttgtccatggttatagcctttctgcttgccctgtggagggccatag

SEQ ID NO: 836 - DNA, 354 bp, Homo sapiens
ccagtgcaaccttcagatagacacatggtgaccagagcccgccaggcttctgcaggtggcagtgtcgagcaagtgtaagatgtctgtgggaaggagaagctcctgaaatgaacgttctgcaaacagaaggctgaggggtcttccaggcatgtccagtcactaggagctgccaccggtgggcttgagtgccaggctctaggctttgtgcagaaagcacccggggcggggggcggtaagggagagcaaaatgggtctctctcaactgcagtcagtgctcctgggaacacggtctcacagacagcacatattctacgtcacagctctagggtttcaaggacttagccatccgacagg

SEQ ID NO: 837 - DNA, 318 bp, Homo sapiens
  misc_feature 282: n = A,T,C or G
ctgaaaatgaaggtaattaaaaccatggaggcgatcagcgaggttctccaggaccttaggtttgatgcggaatctgccgagtgatggcggctccccagggatgcgccgagggagatgggaaacggggcggatggcgcccagcccagccctaactgccagccacattgaagcggacattggcaaccgggtccccagccatgcgcagaaccgtgggtagcatgtgcttggtggtgatgtcctgcccacagacctcagacggcacattgatgcagaagagcgtantcatgcggtgcaggtagttggggtctccggacatgg

SEQ ID NO: 838 - DNA, 277 bp, Homo sapiens
ctgcgcgtcgccaaagtgacaggcggtgcggcctccaagctctctaagatccgagtcgtccggaaatccattgcccgtgttctcacagttattaaccagactcagaaagaaaacctcaggaaattctacaagggcaagaagtacaagcccctggacctgcggcctaagaaggcacgtgccatgcgccgccggctcaacaagcacgaggagaacctgaagaccaagaagcagcagcggaaggagcggctgtacccgctgcggaagtacgcggtcaagg

SEQ ID NO: 839 - DNA, 276 bp, Homo sapiens
ccaaggaatgcaggctgtactatctgcgaaatggagaacgtatttcagtgtcggcagcctccaagctgctgtccaacatgatgtgccagtaccggggcatgggcctctctatgggcagtatgatctgtggctgggataagaagggtcctggactctactacgtggatgaacatgggactcggctctcaggaaatatgttctccacgggtagtgggaacacttatgcctacggggtcatggacagtggctatcggcctaatcttagccctgaagagg

SEQ ID NO: 840 - DNA, 453 bp, Homo sapiens
  misc_feature 387: n = A,T,C or G
ccttctttgccatgaccaagctctttcagtccaatgatcccacactccgtcggatgtgctacttgaccatcaaggagatgtcttgcattgcagaggatgtcatcattgtcaccagcagcctaacaaaagacatgactgggaaagaagacaactaccggggcccggccgtgcgagccctctgccagatcactgatagcaccatgctgcaggctattgagcgctacatgaaacaagccattgtggacaaggtgcccagtgtctccagctctgccctcgtgtcttccttgcacctgctgaagtgcagctttgacgtggtcaagcgctgggtgaatgaggctcaggaggcagcatccagtgataacatcatggtccagtaccacgcactanggctcctgtaccatgtgcgtaagaatgaccgcctagccgtcaataagatgatcagcaaggtcgcac

SEQ ID NO: 841 - DNA, 142 bp, Homo sapiens
agcctctctagtggcagagcagctcacactccctccgctgggaacgatggcttctgcctagtacctatccttgtgtttctgatgcagtggtagcattggttcaagttctctcctgctgtggtcagagttgcttcgatgttgg

SEQ ID NO: 842 - DNA, 83 bp, Homo sapiens
cctaaaagcagccaccaattaagaaagcgttcaagctcaacacccactacctaaaaaatcccaaacatataactgaactcccc

SEQ ID NO: 843 - DNA, 482 bp, Homo sapiens
ccatcggtgtctggcagatgcggcacctcaagagcttctttgaagccaagaagcttgtgtagctgtcccaggcgtcacaacccatcctcccaggctgggggagaaaggacctcctggaactgacttcttctgtcaggaggactggtttccagccatacctgttctggaagggagaggggctggaggcacccacaggcacaagctgaaggcagcagcttggctaatactgagcaggtagtggggcaaattcctgccctctctctctggcctctgggccgtttggtagtaatcacccaggggctggtaaagcccctcctcttggcacctcagaatcacagtgttactgatcagggatgtgaggctgctgttgggggtggggggaggggaatgggcaggcaagccagtcttctgtcttcctttgctaacttagggttttgagcaggttgggggtatggtgcctgtcatacccacctgccaccctg

SEQ ID NO: 844 - DNA, 534 bp, Homo sapiens
  misc_feature 495, 508: n = A,T,C or G
ccagatttttcaagtttaaaggaggaaactgcttattggaaggaactttccttgaagtataagcaaagcttccaggaagctcgggatgagctagttgaattccaggaaggaagcagagaattagaagcagagttggaggcacaattagtacaggctgaacaaagaaatagagacttgcaggctgataaccaaagactgaaatatgaagcggaggcattaaaggagaagctagagcatcaatatgcacagagctataagcaggtctcagtgttagaagatgatttaagtcagactcgggccattaaggagcagttgcataagtatgtgagagagctggagcaggccaacgacgacctggagcgagccaaaagggcaacaatagtttcactggaagacttttgaacaaaggctaaaccaggccattgaacgaaatgcatttttagaaagttgaacttgatgaaaaaggaatctttgttggtctctgtacagaggttnaaggatgaagcangagatttaaggcaagaactagcagtt

SEQ ID NO: 845 - DNA, 175 bp, Homo sapiens
tcgacctgtggcaaatgtggctaccctgccaagcgcaagagaaagtataactggagtgccaaggctaaaagacgaaataccaccggaactggtcggatgaggcacctaaaaattgtataccgcagattcaggcatggattccgtgaaggaacaacacctaaacccaagagggcag

SEQ ID NO: 846 - DNA, 179 bp, Homo sapiens
cgcgtggacagttgcgaggggtctgtgtgaaggcacttgtcacgagcttcaatactgccgccgtcccaggatgggagaactgcgcagcaggaagggcacttctgaaagcacagtggagagatcgctggagcgggcgttctgggcaggaggaagcacagacggcaggcagggtggactgg

SEQ ID NO: 847 - DNA, 410 bp, Homo sapiens
ccaccaaaaccagtcacaagacctggagttgtctgtgcagatgtacgcccaagccgccctggatggagactcccagggattttttaacctggccctgctaatcgaggaaggtacgataatcccacaccatatcttggatttcttggaaattgactcaactctccattctaataacatctccattctccaggaactgtacgaaaggtgctggagccacagtaacgaggagtccttcagcccctgctccttggcctggctttacctgcacttgcggcttctctggggtgctatcctgcactcagccctgatctactttctgggaacctttctgctatccatattgatcgcctggactgtgcagtatttccagtctgtctcagcaagcgatccccctccaagaccatcccagg

SEQ ID NO: 848 - DNA, 557 bp, Homo sapiens
  misc_feature 508: n = A,T,C or G
cacgggcccccagccctgtgtcggccttgtctgtctcagctcaaccacagtctgacaccagagcccacttccatcctctctggtgtgaggcacagcgagggcagcatctggaggagctctgcagcctccacacctaccacgacctcccagggctgggctcaggaaaaaccagccactgctttacaggacagggggttgaagctgagccccgcctcacacccacccccatgcactcaaagattggattttacagctacttgcaattcaaaattcagaagaataaaaaatgggaacatacagaactctaaaagatagacatcagaaattgttaagttaagctttttcaaaaaaccagcaattccccagcgtagtcaagggtggacactgcacgctctggcatgatgggatggcgaccgggcaagctttcttcctcgagatgctctgctgcttgagagctattgctttgttaagatataaaaaggggtttctttttgtctttctgtaaggnggacttccagcttttgattgaaagtcctagggtgattctatttctgctg

SEQ ID NO: 849 - DNA, 525 bp, Homo sapiens
ctgatggtttggaaatgagagaactacagtggtgaagagaccaggaggcagctctcagtgaaaccaacattgcggatgcccttcgtgagccttctcagtcccagcaggaagcccacaacactggcctccccagcctgcctgctgacaacacctaggcttactttatctaaaatcagagtgtaccaggtctgtagcagaaaataatcaactaaatgtcagggacctatgagtcatttaaaacaaaagaggaagtgaaagccattaggcaagctatgtgctgggctgctaacgtagcccctgcagggaggggtcaggagcgcgctgcagtgagccttgggtctcgcaggcccagccctgctgcaaggagccagggcacccaggaaacatcagcacacacacacacagggaccctcccttcatgtcacttgttttgctgccctaaatggcttcttgcaccctaacccctgatcctggaagaaggcagagagactggcccgtacagagacctgcaattctacgcaagct

SEQ ID NO: 850 - DNA, 384 bp, Homo sapiens
cctcttggagcacatcctttactgcattgtggacagcgagtgtaagtcaagggatgtgctccagagttactttgacctcctgggggagctgatgaagttcaacgttgatgcattcaagagattcaataaatatatcaacaccgatgcaaagttccaggtattcctgaagcagatcaacagctccctggtggactccaacatgctggtgcgctgtgtcactctgtccctggaccgatttgaaaaccaggtggatatgaaagttgccgaggtactgtctgaatgccgcctgctcgcctacatatcccaggtgcccacgcagatgtccttcctcttccgcctcatcaacatcatccacgtgcagacgctgacccaggagaacgtcag

SEQ ID NO: 851 - DNA, 423 bp, Homo sapiens
ctcaggaaaaaccagccactgctttacaggacagggggttgaagctgagccccgcctcacacccacccccatgcactcaaagattggattttacagctacttgcaattcaaaattcagaagaataaaaaatgggaacatacagaactctaaaagatagacatcagaaattgttaagttaagctttttcaaaagatcagcaattccccagcgtagtcaagggtggacactgcacgctctggcatgatgggatggcgaccgggcaagctttcttcctcgagatgctctgctgcttgagagctattgctttgttaagatataaaaaggggtttctttttgtccttctgtaaggtggacttccagcttttgattgaaagtcctagggtgattctatttctgctgtgatttatctgctgaaagctcag

SEQ ID NO: 852 - DNA, 413 bp, Homo sapiens
ctgaaaacagtgggaggccagatgctggcatcttccagacgggagcatagccatggtcactctagccgatgtctcctggggctctcaggcggcaaggaccagatgcaccactactgtccaatcccagttttacttagagccacctccttttttggggccattagtccttatttcatgccagattttcactagcggctccctgttcttccaaatcaattcatgaccgtaagtaacataccatattccaaaaagagctcccccaagatgtgccgcatgatcaaaaaatttccatcccaggatcattcctgctgtatccatggcgataatggctttcagggcattccctgctgtgaacgtgaacatcggaaggaaaataatggcaagcctcccttctgggatcttagtgcagacag

SEQ ID NO: 853 - DNA, 288 bp, Homo sapiens
atctgtgagttctgagaggcatttaggccatgggacagggaggatcctgtctggccttcagtttccatccccaggatccacttggtctgtgagatgctagaactccctttcaacagaattcacttgtggctattagagctggaggcacccttagccacttcattcccctgatgggccctgactcttccccataatcactgaccagccttgacactccccttgcaaaccatcccagcactgcaccccaggcagccactcctagccttggcctttggcatgagatggggg

SEQ ID NO: 854 - DNA, 427 bp, Homo sapiens
ccaagtgagatcagccctcaagggcacatgccaagggcagagcagcccatgtagacagcttcggagggcatgggggtgtagggagttcggggtagctcctcattaactatttgttgggtgagtaaaggggtgaggctcagtggcaggtacctctgcaatgacaagctgcctcccctctatgtgtttagcatatgttattagaacgtgtccgacacccctaccgctgccatttgggccctttaataaagccaagtagagaaatctggcaataaaaggcaaatgtaagcatgctttctttaagacgcatcataaatggttttctttaagtgaatggaagagtttgacagagatacacctttgtaagaaaacattaagaatgctggctgactgtggtggctcacacctgtattcccagcactttgggagg

SEQ ID NO: 855 - DNA, 311 bp, Homo sapiens
ccagtattcctggaggatataacactgacatcagcagggttttcaatggcaacaattgcacgagctgccagcagaagcttctcccaggtcctcttgagatttatgatatagatgccatcacttttccttttatagatgtactgttccatctggaagtcaagattggtgccacctaagtgggttcctgctgcaaggaacttaaggacatcctcctccttcatttgcaggacatcaagggctccggacattgtgaaagtttccctttaagttacgacgggaatccagaacaacgccgtatggacccctctgca

SEQ ID NO: 856 - DNA, 328 bp, Homo sapiens
cctatggaagtttggtgctttgctccctgtgtttgcgaaacaggtatctcgtgatttcagaaaagcttgaggagattaagtctttccgggagctgacctgcctggatctttcctgttgcaagcttggagatgagcatgaacttctagaacatctcaccaatgaagccctgtctagtgtaactcagctccacctgaaggataattgtctatctgatgctggggtgcggaagatgacagcaccagttcgagtgatgaaaagaggtatccaatgcctgcatctgtgatctcagggttacatgataagtctaataatgttagattctcaagg

SEQ ID NO: 857 - DNA, 502 bp, Homo sapiens
  misc_feature 473: n = A,T,C or G
ctgaccggaccggtcatgcccgtccggaacgtctataagaaggagaaagctcgagtcatcactgaggaagagaagaatttcaaagccttcgctagtctccgtatggcccgtgccaacgcccggctcttcggcatacgggcaaaaagagccaaggaagccgcagaacaggatgttgaaaagaaaaaataaagccctcctggggacttggaatcagtcggcagtcatgctgggtctccacgtggtgtgtttcgtgggaacaactgggcctgggatggggcttcactgctgtgacttcctcctgccaggggatttggggctttcttgaaagacagtccaagccctggataatgctttactttctgtgttgaagcactgttggttgtttggttagtgactgatgtaaaacggttttcttgtggggaggttacagaggctgacttcagagtggacttgtgttttttctttttaaagangtaaggttgggctggtgctcacagacctc

SEQ ID NO: 858 - DNA, 411 bp, Homo sapiens
cggccgaggtccttaatagttaagttacagctaagaatgtcatgtcttgggttggaattttcatttttagcaccgttaatgtattcacttaaatctatgttagcaccttgtctccaggcagaacaacaaaccatccaaacattttaaacattgggggaaacacgaaggggagggttaaagacagaatccagtactgtggaaggagtggatttagatcacaagatccttgtcgatatccttctgcttgatgccgaagcagccggcccactcatccagggcgatgtacttgtcattgtccaggtcacaggtctcgaaaaagcgggtggtgcaatgctccatggggatgaggggagcacgcagtggagccagctcggtgtgggagaggtacccgtcaatggggtgctggtccag

SEQ ID NO: 859 - DNA, 232 bp, Homo sapiens
aaatcacagagggacttagtattccattaatgcaaatggaaacattaagttcatcatcagatgataaaaggaaaaaaaaaacctgatactcatctcaaaagacgcagagaagacatctgcataaatccagtacctattattatttcaaatttaaaaacttcttcttttttaagagatagggtatcactatgttgcccaggctgatcttgaactcttggcctcagatgatcct

SEQ ID NO: 860 - DNA, 235 bp, Homo sapiens
  misc_feature 230: n = A,T,C or G
tgcccagaaaggaaggggctattgcctcctcccagccacgttccctttcctcctctccctcctgtggattctcccatcagccatctggttctcctcttaaggccagttgaagatggtcccttacagcttcccaagttaggttagtgatgtgaaatgctcctgtccctggccctacctccttccctgtccccacccctgcataaggcagttgttggttttcttccccaatnctttt

SEQ ID NO: 861 - DNA, 457 bp, Homo sapiens
ccaaaggaaagttggaaggcaactgacagattctgccttttaggtacttgaactggcaggaaatgcatcaaaagacttaaaggtaaagcgtattacccctcgtcacttgcaacttgctattcgtggagatgaagaattggattctctcatcaaggctacaattgctggtggtggtatgttaacttctaacattttaaaaaatttcttcagaggaaggaattttttgctgcttttaattagtttttccaggagaggaaatttaagtatattttcaatgatggaagtatggttgtatcatgaaatttgatttatatgtataactcaatgaatttttacctcatacttgagctgcatgtttttaaagatacctttcaagttgaacagtatacactttcttggtttcaaatactgtgattttttaaaaaatcttaagtagaattaattcctgtcactcccc

SEQ ID NO: 862 - DNA, 561 bp, Homo sapiens
ccaggtcatcaccattggcaatgagcggttccggtgtccggaggcgctgttccagccttccttcctgggtatggaatcttgcggcatccacgagaccaccttcaactccatcatgaagtgtgacgtggacatccgcaaagacctgtacgccaacacggtgctgtcgggcggcaccaccatgtatccgggcattgccgacaggatgcagaaggagatcaccgccctggcgcccagcaccatgaagatcaagatcatcgcacccccagagcgcaagtactcggtgtggatcggtggctccatcctggcctcactgtccaccttccagcagatgtggattagcaagcaggagtacgacgagtcgggcccctccatcgtccaccgcaaatgcttctaaacggactcagcagatgcgtagcatttgctgcatgggttaattgagaatagaaatttgcccctggcaaatgcacacacctcatgctagcctcacgaaactggaataagccctcgaaaagaaattgtccttgaagcttgtatctgatatcagcactggattgtagaact

SEQ ID NO: 863 - DNA, 291 bp, Homo sapiens
ccatagctgtcccacctatggttttaaaaacagactgtaacttgatcttctgaaatccttctcgaaccacaactcgttctgttaaagaaatcctaggaaagaagtcctactgatattgtcgatagtctccaaaaggtgaggaaggtaactgagttgaaggcaactgggaggggtcttctgcaaactgaggaccattggaaaactgtgcagaggcaaatcttgtcaacaagataccagctccttcaattaaagctaggagaatgccacccattgcggctgacccaaccatgg

SEQ ID NO: 864 - DNA, 265 bp, Homo sapiens
ctgaacttttccacctggagtccttgggaataccggacgtgatcttcttttataggtccaatgatgtgacccagtcctgcagttctgggagatcaaccaccatccgcgtcaggtgcagtccacagaaaactgtccctggaggtttgctgctgccaggaacgtgctcagatgggacctgtgatggctgcaacttccacttcctgtgggagagcgcggctgcttgcccgctctgctcagtggctgactaccatgctatcgtcagcag

SEQ ID NO: 865 - DNA, 144 bp, Homo sapiens
cctccacctgcgttttgatctagatgagcatattgtccatctcccacagcttgctccggttccgcaggtacgcccgcccgtgctcgcgcgtcagcgacgcgatgtcctcgcgcatctcgttgatgaccgggagcagaaactgct

SEQ ID NO: 866 - DNA, 241 bp, Homo sapiens
ctggctgtaagtagcttcatagcaccagtctttgagaatgtcaagctctccagaaatcatggcctccaggacattggggatgatgtcgttctcgcactgtttcagaaaccggtccttgtcaaaggccgggtccacccggaggatctccgtgagcacctccgacatctctgtcttggagaacaggccccccagcaagtcggtgaccttgtccgtaagggcccgggatgcccggatgaacgcg

SEQ ID NO: 867 - DNA, 364 bp, Homo sapiens
cctgggcccgctgacttcagggtgaggccacagctactgcagcgctttttatttatttatttatttactgagatggagtcttgctctgtcacccaggctggagtgcagtggtgcaatctcggctcactgcaacctctgcctcctgggctgcagtgattctcctgcgttcaagtaattctcctgcctcggccttctgagtagttgggattacaggcatatgccaccacacttggctaatttttcgtatttttagtagaaatggggtttcaccatgttggcgaggctggtctcgaactcctgacctcaaggatcctcctgcctcggcctcctaaggtgctgggattgcaggtgtgagccaccacgt

SEQ ID NO: 868 - DNA, 472 bp, Homo sapiens
ccaccagtccacagatgtgactggtaagggatctagtaacagaggatggagttgggcagaatattatcctggatgatatgcacccagcactaggatacacctttcattagaatgaagagaacagacaaagccctcagaaaagatacaaaggcagagacattgattagaacattatctcataacagaggtggggccattacccaccattattgtaaaataactgtaactaaccaaaacacatacaggcttctttaatggagttaataaaactatggcacattgggaatcaggggcagaggtactgttcccagacggaaaactgggataaagggagccatgctgacagggccttattccagtctaggttgttagaaaggagccctagcccagaaatgacagcaaatagccataatcattatgtggggctgaaccagaggaagccaggctgagccaagaagctggaagtatcttg

SEQ ID NO: 869 - DNA, 368 bp, Homo sapiens
cctttcttgtaagtgaagaaaaaggaatgcagcaaagaagagttcgacattggagtccttagttccatcaggatcccattcgcagcctttagcatcatgtagaagcaaactgcacctatggctgagataggtgcaatgacctacaagattttgtgttttctagctgtccaggaaaagccatcttcagtcttgctgacagtcaaagagcaagtgaaaccatttccagcctaaactacataaaagcagccgaaccaatgattaaagacctctaaggctccataatcatcattaaatatgcccaaactcattgtgactttttattttatatacaggattaaaatcaacattaaatcatcttatttacatgg

SEQ ID NO: 870 - DNA, 411 bp, Homo sapiens
ggcgtgtccttggacttagagagtggggacgtccggcttcggagcgggagtgttcgttgtgccagcgactaaaaagagaattaaatatgggtgatgttgagaaaggcaagaagatttttattatgaagtgttcccagtgccacaccgttgaaaagggaggcaagcacaagactgggccaaatctccatggtctctttgggcgggagacaggtcaggcccctggatactcttacacagccgccaataagaacaaaggcatcatctggggagaggatacactgatggagtatttggagaatcccaagaagtacatccctggaacaaaaatgatctttgtcggcattaagaagaaggaagaaagggcagacttaatagcttatctcaaaaaagctactaatgagtaataattgg

SEQ ID NO: 871 - DNA, 385 bp, Homo sapiens
  misc_feature 13, 14, 15, 27, 108, 113, 159, 199, 215, 221, 229, 245, 258,260, 277, 284, 293, 309, 311, 325, 339, 350, 374, 377: n = A,T,C or G
ttttttttttttnnntttttttttttnaaagattcactttatttattcattctcctccaacattagcataattaaagccaaggaggaggagggggggtgaggtgaaanatganctggaggaccgcaataggggtaggtcccctgtggaaaaagggtcanaggccaaaggatgggagggggtcaggctggaactgaggancaggtgggggcacttntccctntaacactntcccctgttgaagctntttgtgacgggcnanctcaggccctgatgggngacttcncaggcgtanactttgtgtttctcgnantctgctttgctcancgtcagggtgctgntgaggctgtanggtgctgtccttgctgtcctgctntgngacactct

SEQ ID NO: 872 - DNA, 184 bp, Homo sapiens
  misc_feature 17: n = A,T,C or G
cttccttcggtctttantatttttgattgttatgtaaaactcgcttttattttaatattgatgtcagtatttcaactgctgtaaaattataaacttttatacttgggtaagtcccccaggggcgagttcctcgctctgggatgcaggcatgcttctcaccgtgcagagctgcacttggcctcag

SEQ ID NO: 873 - DNA, 397 bp, Homo sapiens
ctgtgggctctgaatggcgtccctttggctatccacgccgccggcgaccactgaattctgtggttctacaacagggtctggctgaccgaattgtcagagacgtccaggaattcatcgataaccccaagtggtacactgacagaggcattccttacagacgtggctacctgctttatgggccccctggttgcggaaagagcagttttatcacagccctggctggggaactggagcacagcatctgcctgctgagcctcacggactccagcctctctgatgaccgactcaaccacctgctgagcgtggccccgcagcagagcctggtactcctggaggatgtggatgctgcttttctcagtcgagacttggctgtggagaacccagtaaagtaccaagg

SEQ ID NO: 874 - DNA, 156 bp, Homo sapiens
ccagaagaacactatgccatggttgcactgaattttgtgcctactctagggcaaacagaattacaatcgaaggagttcctatctatctgtaaagaagagaacatgaaattctgttggcagaagcagcattttgaagaaataaaaggttcactgcag

SEQ ID NO: 875 - DNA, 512 bp, Homo sapiens
  misc_feature 504: n = A,T,C or G
ccagcatagcgaaaacttgtctctactaaaaatacaaaaattagtcaggcatggtggtgcacgtctgtaataccagcttctcaggaggctgaggcacgaggatcacttgaacccaggaggaggaggttgcagtgagctgagatcatgccagggcaacagaatgagactttgtttaaaaaaaaaaaaagtgacttgatttaagggaaaaaatgactggctatattcagtcagatatggcaaagagtctcaaggtgttaatgtgaatgattaaggtcttggggggggtgtcccctatcagactacaggtgtttagaggcacagaaaaaggtgcagttgggttcttaatgtgaaatgatgagaagcacaactccagtgtgtctctttgtgtagaatgtcagcagacaccccctgctagatgtgctggatcatgggaaagcatttccatttgttaatagattgttcagaagttttaatttatgatgggtgtggtggctcatgcctgtngtcccagc

SEQ ID NO: 876 - DNA, 199 bp, Homo sapiens
cctgtgccgggccccagggctggcagccaccagctcctcttccaggcatgggggacaccctgacaggatccggaagtctccatttacccaaaaatgcaagagccatgatcagtcatggcgacactgcaggcggtactgagtgaccatgtccagtccggctccgtccctcccacacgggggacaagcttctccgaggagg

SEQ ID NO: 877 - DNA, 486 bp, Homo sapiens
cgcgtgtgctgctcccttctgccaggagcccactgcttttgcacacaagctgcattttgcgcattgactcaggtcccagttgctcttcatatctccgtgaatgattggagtgcaaagatactgttctgagcgcttcccgttttctgaaagccatgtctctcaggcatgcctcgcttagttggcgatggggttggttgactgttttcgcttttttcttcttctcttttcttcttcttcttctttttttttcttttccttttctccccctcccaacgccactgacaagaaagcactaaagatgcaggttgtgcgatcaccctataacataaggaaaagaacaggagaggttaatttgaacgtgtaggctagtggtagagggagatggaggtctggggaaagagtctgtcaggtagacatctcttttaacatgtcccagtattcggttcaccagtatctctgcacctcactactacccttcactccttg

SEQ ID NO: 878 - DNA, 363 bp, Homo sapiens
cctgggcccgctgacttcagggtgaggccacagctactgcagcgctttttatttatttatttactgagatggagtcttgctctgtcacccaggctggagtgcagtggtgcaatctcggctcactgcaacctctgcctcctgggctgcagtgattctcctgcgttcaagtaattctcctgcctcggccttctgagtagttgggattacaggcatatgccaccacacttggctaatttttgtatttttagtagaaatggggtttcaccatgttggcgaggctggtctcgaactcctgacctcaaggatcctcctgcctcggcctcctaaggtgctgggattgcaggtgtgagccaccacgtctgg

SEQ ID NO: 879 - DNA, 365 bp, Homo sapiens
  misc_feature 357: n = A,T,C or G
gcccatgccagcgtgtggtcagcacgcacaacttgtggctgctgtccttcctgaggaggtggaatgggagcacagccatcacagacgataccctgggtggcactctcaccattacgctgcggaatctacaaccccatgatgcgggtctctaccagtgccagagcctccatggcagtgaggctgacaccctcaggaaggtcctggtggaggtgctggcagaccccctggatcaccggaatgctggagatctctggttccccggggagtctgagagcttcgaggatgcccatatggagcacagcatctccaggagcctcttggaaggagaaatccccttcccacccacttccatccttntcctcctg

SEQ ID NO: 880 - DNA, 431 bp, Homo sapiens
ccatctcccctcaccccaacctggataaaatgttacactacccactaatataaccactgacacacaaaccaagctccttccagtttaacattgaacatcaatctacatttccagtgaatgagctaaacttatgagcaggccattcaacttttcatgatacatttagtgctcagaaatggttgattccattagcctgccctatagctcaggtggcccaagatggagcctatcatcttccttggggtgtttggtgtttccaagtaggagcataaaaaggataccgtcccctaccccaccaccccatcccacataccctcactggcatccaggagaccagcagcaggctcaagaccccaaatgttgggcaccacaaataatgtgatatgtgccaggagcacggggggtaggggtgaaagagaaaaacaataagg

SEQ ID NO: 881 - DNA, 335 bp, Homo sapiens
ccacagaggtggtattacaaaatatacaaagtggtttctttctttacatttcatagaagaagcctgcctcatttccaaatgagagcactagaagcacaaatcatgcagaccatttactatataacttatgaaaaatgctgtacagggctgtgactatagatatagagtatttggctctgtttgggaattgatatctacaagggggagggtcaggggaggactgtctgatatcctgacttgctgggatggtggagaagctgggatgggggaggccccaatcttgctgcacggctacacccactcctcctttcctagataaggctggagcgcactgg

SEQ ID NO: 882 - DNA, 353 bp, Homo sapiens
atgcactcaaagattggattttacagctacttgcaattcaaaattcagaagaataaaaaatgggaacatacagaactctaaaagatagacatcagaaattgttaagttaagctttttcaaaaaatcagcaattccccagcgtagtcaagggtggacactgcacgctctggcatgatgggatggcgaccgggcaagctttcttcctcgagatgctctgctgcttgagagctattgctttgttaagatataaaaaggggtttctttttgtctttctgtaaggtggacttccagcttttgattgaaagtcctagggtgattctatttctgctgtgatttatctgctgaaagctcag

SEQ ID NO: 883 - DNA, 193 bp, Homo sapiens
ctggcagagaagaatggctacgtgactgtcagtgagatcaaagccagtcttaaatgggagaccgagcgagcgcggcaagtgccggaacacctgctgaaggaagggttggcgtggctggacttacaggccccaggggaggcccactactggctgccagctctcctcactgacctctactcccaggagattacag

SEQ ID NO: 884 - DNA, 461 bp, Homo sapiens
ctgaagaaccccatcagcgggctgttagaatatgcccagttcgctagtcaaacctgtgagttcaacatgatagagcagagtggaccaccccatgaacctcggtaagagaccacccaggaactgtacctagggttggggtcaggtgcttttgctcctgacgcagtcttggctgatttgtgagcagtgctgtttggtggcgcctatcttttcctccttcccttctgccttttagctaaattccccttgattggccctttctccagatattgagcagggaatatagaccttggaccagccagaatcttggctgaacaagggggaggttgactctgttggctgtaatgaagcttctttagaaatgattggttttggccgtacgcggtggctcatgcctgtaatcccagcactttttgaggccgaggcaggcatatcacgaggtcaggagtttgagaccagcctgg

SEQ ID NO: 885 - DNA, 266 bp, Homo sapiens
  misc_feature 14: n = A,T,C or G
ctgcaatgcttcancacacttcagcaccgaggctgggcatgaggggtccgtcaccaccacatcaaatacccctaaagcaatatctttgttatgggcacttgaatggtgctgcttcacagaggctgcaccaccagtcatgaggatctcagaccagagctccaggaagttctgctgttggtctgataccaagagtaccttcagattctggaaaggattttcacggggttgccagtccagaattctttgctcctcaaggctgtacccag

SEQ ID NO: 886 - DNA, 402 bp, Homo sapiens
cgcgtggtttccgattgtttgatagtatttactggagagatcatagaaacgactgtgaaccgatgtcacaccaggaaggttgttgagcatttcttcaacatcttcaattgtttcctttgtaacctgtaggtccccgatgtttaattttagagctccaattgctgttttacacaggatcactgcctcatcattacttttcaccttctcacgagtcttttccagaaaagtaagagccacattaggatcagtcatctgtctaactacatgaagaatgatttccacgagggacaaagggttcaccctgtgttcaaattcactgataaagttttcataaagcttaatgagaccatctccttgggcaaagcacggatcctgcacaaaatcaagcacctgaagtgtcag

SEQ ID NO: 887 - DNA, 342 bp, Homo sapiens
ccaaagcgagagcattggcagtgaattgcagacactcttccttggtcatgccttcccggtaggtagcatcaacatagccatagatgtaggagctcccggagcctccaatggcaaaggactgccttaccatcataccccccataggcactgagtacacctgccctccttcttgagggtcccagcctgcgatgatgattcccgccatcaggtcttcccggtatcggtaacacatctccttaaagaggctggctgctgtgtggaccagtggaggctcattcagttcaatgctgtggaaaccgagctggtaggtgacagcatcagctactgcctgggtatcagcag

SEQ ID NO: 888 - DNA, 228 bp, Homo sapiens
cgcgtcggccaaggctgctgctgttgctcctccaaagaaggttggcttcaaggccgtgtccagggacccacgagcagaggcactggggggcaagggatctccaagggggcaagggatccctaaagggggtagctcacaggtgagggggtttagggcccctctagggagcgcctgaggccatacattcaagagtgtccctggtgaggcccagggaagagccaggactgg

SEQ ID NO: 889 - DNA, 378 bp, Homo sapiens
ttggcttttctccccttctcatcctcctctcccctttcctcactgaaggctgtgagttgctttcaatgtgacaacactatgatgtcatttggaaggatttgccaggacagactgattctgagtcctgggtgccgtatgtgtatgcggcagtgttgtcaggcgatcttgtttgaagctctatgttgccataattaccatcaagtacacactgttggcaaaaggctaacacctgactttaggaaatgctgatttgagaacaaaaggaaaggtcttttttcactgcttaaagtggggtcactttgatacctttgcggtcatgtctgtgtctgatgagtgtagaatctctggatgtgcactgtcagtcatgtgtccaccagg

SEQ ID NO: 890 - DNA, 215 bp, Homo sapiens
ccattttggagtgtgtccattgggtagcaatgtggaaaccaccagggcctttgtggagaaaatggagggggttgagggagtcccaggaggggcttatttgagggcctttgccacttgctcataggcgagctcgatctcctcatcatctggacaggtggaagcgaattcttcccgggcgtaggcattgctcaagtaccgatgcactccccggaagg

SEQ ID NO: 891 - DNA, 412 bp, Homo sapiens
ctggtcaagttcaacagagccttggctgaccattctatggctcaggcacctcggctcattgatggcattgttcttaccaaatttgataccattgatgacaaggtgggagctgctatttctatgacgtacatcacaagcaaacccatcgtctttgtgggcaccggccagacctactgtgacctacgcagcctcaatgccaaggctgtggtggctgccctcatgaaggcttaacgtggctcttgcccaataccaaatcgccgctttccccacaagcccttcttcctgtatcaagaatgtgctttagagtatgtgagcaacctgtcttcagtgtagtacaaaggcagagtgagggggcttgtggctccttccaaccccactccccgttcagcacagccgccatctgcaaggaagg

SEQ ID NO: 892 - DNA, 472 bp, Homo sapiens
  misc_feature 85, 169, 171, 181, 201: n = A,T,C or G
ttttttttttttttttttttttaattactaccttttattctaatgtgaaccatggccctgaaagctgataacaagcttggctgancagagggaactaggggtcggcagaaaggattatgggtggaaaacattggctcttccttggggagtgatgctggggaaagggaananagtggctcancctgcaggtaaataggctanaaaagccaaggccaaaggctggaggggagaggacagtcagcatgtccagcctggggtctgggtgtagggttatcccttctccctgtgccttcccatctcgtccatgagcctaggtcttggagccttgtgttggaggctgctgtgatgtcaggaacggggatctgtctagcttttggccacttcctgggacctcacgcccctgttgacagatggagattgggcagcagggccttgctgcgttgttatctgctgttccgacttggtttgtctt

SEQ ID NO: 893 - DNA, 477 bp, Homo sapiens
  misc_feature 436, 447, 449: n = A,T,C or G
caaagattcactttatttattcattctcctccaacattagcataattaaagccaaggaggaggaggggggtgaggtgaaagatgagctggaggaccgcaataggggtaggtcccctgtggaaaaagggtcagaggccaaaggatgggagggggtcaggctggaactgaggagcaggtgggggcacttctccctctaacactctcccctgttgaagctctttgtgacgggcgagctcaggccctgatgggtgacttcgcaggcgtagactttgtgtttctcgtagtctgctttgctcagcgtcagggtgctgctgaggctgtaggtgctgtccttgctgtcctgctctgtgacactctcctgggagttacccgattggagggcgttatccaccttccactgtactttggcctctctgggatagaagttattcagcangcacacaacanangcagtttccagatttcaactgctcatca

SEQ ID NO: 894 - DNA, 289 bp, Homo sapiens
ctgtcttatggctatgatgagaaatcaaccggaggaatttccgtgcctggccccatgggtccctctggtcctcgtggtctccctggcccccctggtgcacctggtccccaaggcttccaaggtccccctggtgagcctggcgagcctggagcttcaggtcccatgggtccccgaggtcccccaggtccccctggaaagaatggagatgatggggaagctggaaaacctggtcgtcctggtgagcgtgggcctcctgggcctcagagtgctcgaggattgcccggaacag

SEQ ID NO: 895 - DNA, 179 bp, Homo sapiens
  misc_feature 14: n = A,T,C or G
ctggatgggtccanacaaagtggaatccctggaacctttaactgagcagtgaaggtcagtgcctcagagcctgagagatgaacaggaccagagagagaggtgggcaggcaggcacaaggttatgtcttcctcagactcggaaccctgctcttctccaccatccagacgttcagctacag

SEQ ID NO: 896 - DNA, 557 bp, Homo sapiens
  misc_feature 367: n = A,T,C or G
ccactcactgctgggacccaggcacctcccttctccatcctctctggattgtcagtaatgtcctggaacagaagcctgtgggatggccttgggcacggagaagccctggggtcagtgtcgtgcacggatggcggcagtgttgaacccaggaggctgaacccggcccaccacggaagatgagtgcatggcaaccgcctgccttcacgtcgctccacttggtaaccccaaggtctgggctgttctaggtattgcttcacgtgccccagcaagcccttaacaagagggcctggttccctgaagaaccaatcccaggaaggggccttgatccctccgccttgctgagagtgaaccctcgtctctcctcacnctccatttcatttctgggaattggggcttagtttcgaacctttggcaaggctgttcttactaatgcccaagcccctttacccctctccctataggttacacaggggagaccagggcctcggcagaagactgctgccacacttccgaatcattctgcttgccaaataggtcatcttcaccagttgactgac

SEQ ID NO: 897 - DNA, 495 bp, Homo sapiens
ctggaatctcctttgcaatcccatctgataagattaaaaagttcctcacggagtcccatgaccgacaggccaaaggaagagccatcaccaagaagaagtatattggtatccgaatgatgtcactcacgtccagcaaagccaaagagctgaaggaccggcaccgggacttcccagacgtgatctcaggagcgtatataattgaagtaattcctgataccccagcagaagctggtggtctcaaggaaaacgacgtcataatcagcatcaatggacagtccgtggtctccgccaatgatgtcagcgacgtcattaaaagggaaagcaccctgaacatggtggtccgcaggggtaatgaagatatcatgatcacagtgattcccgaagaaattgacccataggcagaggcatgagctggacttcatgtttccctcaaagactctcccgtggatgacggatgaggactctgggctgctggaataggacactcaagacttt

SEQ ID NO: 898 - DNA, 406 bp, Homo sapiens
ccacgactgcatgcccgcgcccgccaggtgatacctccgccggtgacccaggggctctgcgacacagggagtctgcatgtctaagtgctagacatgctcagctttgtggatacgcggactttgttgctgcttgcagtaaccttatgcctagcaacatgccaatctttacaagaggaaaccgtaagaaagggcccagccggagatagaggaccacgtggagaaaggggtccaccaggccccccaggcagagatggtgaagatggtcccacaggccctcctggtccacctggtcctcctggcccccctggtctcggtgggaactttgctgctcagtatgacggaaaaggagttggacttggccccggaccaatgggcttaatgggacctagaggcccacctggtgcag

SEQ ID NO: 899 - DNA, 277 bp, Homo sapiens
cctaagagtcattaaaaaattctccctttgtaacctcagtgctggggactgaggcgagccccctcaggtcgctggagtgcaccagtcttggggaagaggtgcaggagaagctgtgttttttatctccacacgcagtatgaagataaaattacatagtattacctagacatagacagtattacctaggtagatgcactgctcacctgcacccttcccagctctcatttttgttaggtgatttgggatagggatagtgttttggggtatggggggagtg

SEQ ID NO: 900 - DNA, 389 bp, Homo sapiens
ctgttttgaaatatttactgttattaaaacttgcttcaagggaaattgtgaatatatttccatatacaagcactagtaacagtaagtggccctgtcatccactaactcaggcaaagtaaagaatggcatttttgaaggacattttacctccccatatgatttgattggctaggactttcttctgtaaagtcataccttttcacatcttaagtttttacatttgccattttccaaatctcaattttgggcaagaacgatatagtcacaactatggggctgctttcaaaagcggggctccatttctactgtcagatcaatgtggtgctgtaaccatctttttatccctaccttcaagaacctccttatatgaagcctgtctttatccatca

SEQ ID NO: 901 - DNA, 453 bp, Homo sapiens
ctggagacacccacttgggtggagaagattttgacaaccgaatggtcaaccattttattgctgagtttaagcgcaagcataagaaggacatcagtgagaacaagagagctgtaagacgcctccgtactgcttgtgaacgtgctaagcgtaccctctcttccagcacccaggccagtattgagatcgattctctctatgaaggaatcgacttctatacctccattacccgtgcccgatttgaagaactgaatgctgacctgttccgtggcaccctggacccagtagagaaagcccttcgagatgccaaactagacaagtcacagattcatgatattgtcctggttggtggttctactcgtatccccaagattcagaagcttctccaagacttcttcaatggaaaagaactgaataagagcatcaaccctgatgaagctgttgcttatggtgcag

SEQ ID NO: 902 - DNA, 293 bp, Homo sapiens
cctccggccgcccccacggctcccatggcctcttcctgcgctaccgtgtggaggccctaaccctgcgtggcatcaatagcttccgccagtacaagtatgacctggtggcagtgggcaaggctttggagggcatgttccgcaagctcaaccacctcctggagcgcctgcaccagtccttcttcctctacttgctccccggcctctcccgcttcgtctccattggcctctacatgcccgctgtcggcttcttgctcctggtccttggtctcaaggctctggaactgtggatgcag

SEQ ID NO: 903 - DNA, 228 bp, Homo sapiens
ctggagactctgggccaggagaagctgaagctggaggcggagcttggcaacatgcaggggctggtggaggacttcaagaacaagtatgaggatgagatcaataagcgtacagagatggagaacgaatttgtcctcatcaagaaggatgtggatgaagcttacatgaacaaggtagagctggagtctcgcctggaagggctgaccgacgagatcaacttcctcaggcag

SEQ ID NO: 904 - DNA, 388 bp, Homo sapiens
ccaagcgctcagatcggcaaggggcaccagtcttgatctgcccagtgcacagccccacaaccaggtcagcgatgaaggtatcttcagtctcccccgaacgatgaggcaccatgacgccccaaccattggcctgggccagcttgcacgcctgaagagactcggtcacggagccaatctggttgactttgagcaggaggcagttgcaggacttctcgttcacggccttggcgatcctctttgggttggtcactgtgagatcatcccccactacctggattcctgcactggctgtgaacttctgccaagctccccagtcatcctggtcaaagggatcttcgatagacaccactgggtagtccttgatgaaggacttgtacaggtcagccag

SEQ ID NO: 905 - DNA, 272 bp, Homo sapiens
  misc_feature 14: n = A,T,C or G
ccggagcccacggnggtcatggctgccagagcgctctgcatgctggggctggtcctggccttgctgtcctccagctctgctgaggagtacgtgggcctgtctgcaaaccagtgtgccgtgccagccaaggacagggtggactgcggctacccccatgtcacccccaaggagtgcaacaaccggggctgctgctttgactccaggatccctggagtgccttggtgtttcaagcccctgcaggaagcagaatgcaccttctgaggcacctccag

SEQ ID NO: 906 - DNA, 525 bp, Homo sapiens
ctgtgcacccgagtgtcctttcccccctaagctggcacataggagcaaaagttcactaaccctgcagtggaaggcaccaattgacaacggttcaaaaatcaccaactaccttttagagtgggatgagggaaaagaaatagtggtttcagacagtgcttcttcgggagccagaagcactgcaagttgacaaagctttgtccggcaatggggtacacattcaggctggccgctcgaaacgacattggtaccagtggttatagccaagaggtggtgtgctacacattaggaaatatccctcagatgccttctgcaccaaggctggttcgagctggcatcacatgggtcacgttgcagtggagtaagccagaaggctgttcacccgaggaagtgatcacctacaccttggaaattcaggaggatgaaaatgataaccttttccacccaaaatacactggagaggatttaacctgtactgtgaaaaatctcaaaagaagcacacagtataaattcaggctgactgcttct

SEQ ID NO: 907 - DNA, 365 bp, Homo sapiens
gtaaattttaagtctttcagttttatagatacggaaaacaagggtgactctttaccacaggatgaataaagaactaagtaatatgggaaatgcagcaatttctggactagctgagccgattccttcctgtgagcacactgtaagctttcaagttctctgggcaggaattacagcacctgtcccctgcaatggccctgctgtgtgatgctcatcgcttcccttcgtgctggagcagtcccccaggtgtccatctcctatctttttgttccaatcttctgtgagttccagctagcaggctttacatctggggaaaggaaaaccaggggttttagctctgttctctgctcccatccttcgctcaccag

SEQ ID NO: 908 - DNA, 608 bp, Homo sapiens
  misc_feature 594: n = A,T,C or G
cggaggtgcctcagccatggcatggatccctctcttcctcggcgtccttgcttactgcacaggacgtgcggcctcctttgaggtgacccagccaccttcaatgtccgtgtccccaggacagacagccaagatcacctgcactggagataggttgggggatgaatatgtttgctggtatcaacagaagccaggccagtcccctgtattgataatatatttggataacaagcggccctcggggatccctgaccgattctctgcctacgcctctgggaacacagccactctgatcatcagcggggcccaagttatggatgaggcttattattactgtcaggcgtgggacggcagaactgtggtgttcggcgaagggaccaacctgaccgtcctaggtcagcccaaggctgccccctcggtcactctgttcccgccctcctctgaggagcttcaagccaacaaggccacactggtgtgtctcataagtgacttctacccgggagccgtgacagtggcctggaaggcagatagcagccccgtcaaggcgggagtggagaccaccacaccctccaaacaaagcaacaacaagtacgcggncagcagctatctga

SEQ ID NO: 909 - DNA, 513 bp, Homo sapiens
ctggtctcaaactcctcacctcaactgatccgcccaccttggcctcccaaagtgctgggattataggtgtgagccaccgtgcccaaagttaagtatttttgatcaagtgttttgtcttttgtgcaaggcatttgtggctctgtcatagcagaggaaaacaaaacatgcctatcaaatgaatcaagtccgacctcttctcatattgagcaactagaggtctaggaacatttcccctacctgtcattctcatctggcataccaggtgtacatactccttcttattctcctctgttaccaagatgttggccccattgggtttgaggtcacgaactccacaaactccaaactcttggacctcagtgctgaaggtgaggtcatagcctagtgtggagacatcattttccagcagataaaccagaccttggtagaagtggtaatcttcactctccatatctgtatatctgactgacttgcccaagatgtgtttgtaaaaggatcgagtaaagtagcact

SEQ ID NO: 910 - DNA, 272 bp, Homo sapiens
ccggagcccacggtggtcatggctgccagagcgctctgtatgctggggctggtcctggccttgctgtcctccagctctgctgaggagtacgtgggcctgtctgcaaaccagtgtgccgtgccagccaaggacagggtggactgcggctacccccatgtcacccccaaggagtgcaacaaccggggctgctgctttgactccaggatccctggagtgccttggtgtttcaagcccctgcaggaagcagaatgcaccttctgaggcacctccag

SEQ ID NO: 911 - DNA, 263 bp, Homo sapiens
cctgcaggtacaaattgaccaggctgttgacggctgcctccacgtcggtggaataattctgacgaatctgggagctcatggttggttggcaagaaggagctaaccacaaaaacggtgctggcaggtcccagaagcaggagatggccgagaagatggtcccggaggttgcaagcggagaggaaatcggagggcggtcggaggctggaagagagtccccggatctgttccgtccaaacactgttgaagcaagagacagacccgcg

SEQ ID NO: 912 - DNA, 470 bp, Homo sapiens
ctgtgagcaccagcccaaccctacctctttaaaaagaaaaaacacaagtccactctgaagtcagcctctgtaacctccccacaagaaaaccgttttacatcagtcactaaccaaacaaccaacagtgcttcaacacagaaagtaaagcattatccagggcttggactgtctttcaagaaagccccaaatcccctggcaggaggaagtcacagcagtgaagccccatcccaggcccagttgttcccacgaaacacaccacgtggagacccagcatgactgccgactgattccaagtccccaggagggctttattttttcttttcaacatcctgttctgcggcttccttggcactttttgcccgtatgccgaagagccgggcgttggcacgggccatacggagactagcgaaggctttgaaattcttctcttcctcagtgatgactcgagctttctccttcttatagacgtt

SEQ ID NO: 913 - DNA, 426 bp, Homo sapiens
cctggacaccataaggctggtgggctttcagaattgtgttaggggggcaggagtggcaggttcctgaatctcggtcaatatagtaaccagcaggacaagaggtgcaggaggagcccacatcagaggcttctagggcacagggacggcagtaggaggccacgccattcataacattggtgacattgatggagtagatcttggcaacgtcattggtgtacttcctgcttgcctcatgaaaagtggtcctctggaaggcccaggtgaggctcgtggtagtgttctcctcaatgatgtaggtataggactgtttgcctttggaacctttccacgtctccacaggagtgttggtcctagaattcacacccaccatgaagtagagctcacagttcacagaacagagggtctcaaagacaaatgtgattctgg

SEQ ID NO: 914 - DNA, 252 bp, Homo sapiens
ccaagctgggggtgcgcacatgtggaagaactggaggcccggtgtcatgagcagaggctgtaccctagatgcccgccccagtgccagccaacccaagacaggagaaagagtttggcagtttcgcctctgaggaatacatgcctggccctcctgtgaggtgaggcggtaggggggaaggcgcaggctccgaagtctgagggcttgccggagggggagtttctgagccttttgcatgggtgcatgccccctgcc

SEQ ID NO: 915 - DNA, 234 bp, Homo sapiens
ccactgggactttggcttcctgatgccgattgtggatttctgctgcaaagacagtgatgttgagccaggctgtttcctctctatccagaggttttgtagttttaataaaaccatcctctggattaatagtgaaaaatctgtcgaggtcagtgtgacgatcgatggaataccttatcgggctgttggcagcatcagggtctttggcatgcactctcccaaccacggtgccagcag

SEQ ID NO: 916 - DNA, 366 bp, Homo sapiens
  misc_feature 14, 338: n = A,T,C or G
ccattcagtctcanttcagaaaattccagaagaagaaggctgggtctcagtcctagtgggagaaccccctcctagtccacctgaaaacaccaaattcaaccatcatctgtcaagaaattaaaagaacaacaccctagagagaagtcatccacacacaatccacacacgcatagcaaacctccaatgcatgtacagaaacctgtgatatttatacccttgtaggaaggtatagacaatggaattgtgagtagcttaatctctatgtttctctccattttcattcctcctgcaactattttccttgatgttgtaataaaatgaagttacgatgagtgatnaaaaaaaaaaaaaaaaaaaaaaaaaaaa

SEQ ID NO: 917 - DNA, 492 bp, Homo sapiens
ggcacagcgagggcagcatctggaggagctctgcagcctccacacctaccacgacctcccagggctgagctcaggaaaaaccagccactgctttacaggacagggggttgaagctgagccccgcctcacacccacccccatgcactcaaagattggattttacagctacttgcaattcaaaattcagaagaataaaaaatgggaacatacagaactctaaaagatagacatcagaaattgttaagttaagctttttcaaaaaatcagcaattccccagcgtagtcaagggtggacactgcacgctctggcatgatgggatggcgaccgggcaagctttcttcctcgagatgctctgctgcttgagagctattgctttgttaagatataaaaaggggtttctttttgtctttctgtaaggtggtcttccagcttttgattgaaagtcctagggtgattctatttctgctgtgatttatctgctgaaagctcag

SEQ ID NO: 918 - DNA, 557 bp, Homo sapiens
  misc_feature 527: n = A,T,C or G
ctgctcctgggtaggcgtgcgggccatatcgtaggggtaggatactagccgctcgccgccgttcagatttgctcccagcacgaaggggttcttctccatccaggcaatgatggcccggacctccgtggataccgtggcatctggcgaaaggtagcgttcagggatgggcaagttattgttggggacccggtaggggacccatttcctctcctcagctccccagagcacagagttgagatccgggaaatcttcaaagatgtcaaagccctcctcagtccacagtcccagcgcccagttcccaaactctgagcccatctgcgctgccacctcgtagccatcagggttcagtgagggcaccaggtggatgcgtgtgtcctgcaccaggctgcgcacacgtgggttcccatcgcggtactctcggcacaggtactgcatgagcagcagcaacagctctcggcccagcacctcgttgccatggatcccagcagtgtagcggaactcgggctcccccagttcatgctccccanggttgtctgagatctccatggcatagatct

SEQ ID NO: 919 - DNA, 407 bp, Homo sapiens
ccttatgactacaacggcccacgagaaaaatatggaatcgttgattacatgatcgagcagtccgggcctccctccaaggagattctgaccctgaagcaggtccaggagttcctgaaggatggagacgatgtcatcatcatcggggtctttaagggggagagtgacccagcctaccagcaataccaggatgccgctaacaacctgagagaagattacaaatttcaccacactttcatcacagaaatagcaaagttcttgaaagtctcccaggggcagttggttgtaatgcagcctgagagattccagtctaagtatgagccccggagccacatgatggacgtccagggctccacccaggactcggccatcaaggacttcgtgctgaagtacgccctgcccctggttgg

SEQ ID NO: 920 - DNA, 340 bp, Homo sapiens
  misc_feature 14, 15, 304, 318, 319, 325: n = A,T,C or G
cctcttgggcagcnnagggccctgcctctgtttcatgatgcatgggtcatttgtcttgggtgtcctatcccatatggagaagaaaggggctctaagttctggctcttctttctttggggttctctgtacctgaggaaaccaggccctgggtgactttgcagatctgctcaccctcggtgagcaacagtgtcagccatgcaagcaggacagaatggtgactgggtgcccttggtgagctgtgtatttcctaggaggtagaaaactgtgggaaactgtggctaataaaaactaagtgtgagcgtcnaaaaaaaaaaaaannaaaaanaaaaaaagcttgtac

SEQ ID NO: 921 - DNA, 571 bp, Homo sapiens
ggaaaaataattttattcctcaaatgatcagcacattcagaagcaggacagaggagctctgatgacatctctgggggactcaaagcggccctcattttctggtattttcccaggtgattctcttccaacctgtgagtcctgctctctttcctcccatctgaagtttgagacatcctctgccacaaggaaagccaccaataccagcccaaagagccaccagagaggaaccaaaccacatgcatcaagttataggaaggatgcaagaagggaaattaggaaggaaagggaggagtttagttggcattctggggcatgctaacatgagggcgatggtctctctccaagtcgctggacatatcccttttctttccaggtgctccaactccaattgcagtttgggggaacgtgtgaaacttgttgaagtcctgcgtgtatgtgcccagcatgcaagtactcagattaccgcaccgcttagatctggggctgtccaggctggagccctctctctcttgctcctgctccagctcactggccttcatctgcacatagtcctgcaccagtgcagccagca

SEQ ID NO: 922 - DNA, 262 bp, Homo sapiens
  misc_feature 7, 12, 125, 198, 208, 214, 231, 253: n = A,T,C or G
gcccaanacatncaggtcacagcagattcgggcacgtgtggaagaaggttggatgatgtcatccacaaaccctcgcactgctgcagggaaagggttggcaaacttctcgatgtactctgcctgancagcttccacattctcatgccctttgaagatgatctccacagcgccctttgctcccatgactgcaatctctgnggtgggccangcatanttggtatcaccacaaangtgcttagagctcatgacatcntaggcacct

SEQ ID NO: 923 - DNA, 234 bp, Homo sapiens; identical to SEQ ID NO: 915

SEQ ID NO: 924 - DNA, 152 bp, Homo sapiens
ccaggattgacaggccatccattcacagccaggagatgctgggccagttcctccaagaggtctccgtcatggcagtgatgaaaacctaacagggtggccccctgtgccagctcaggtgactggagcccgagggcctgacaggttcccagcag

SEQ ID NO: 925 - DNA, 400 bp, Homo sapiens
caatatcatgccaaggacccaaacaacctcttcatggtgcgcttggcacagggcctgacacatttagggaagggcacccttaccctctgcccctaccacagcgaccggcagcttatgagccaggtggccgtggctggactgctcactgtgcttgtctctttcctggatgttcgaaacattattctaggcaaatcacactatgtattgtatgggctggtggctgccatgcagccccgaatgctggttacgtttgatgaggagctgcggccattgccagtgtctgtccgtgtgggccaggcagtggatgtggtgggccaggctggcaagccgaagactatcacagggttccagacgcatacaaccccagtgttgttggcccacggggaacgggcagaattgg

SEQ ID NO: 926 - DNA, 521 bp, Homo sapiens
ccacgtccctattttagaaatgagaggagtgactgcacacaggaaaaatgccacttttagcaattcaaagtggaaaaacttcttttatataaaaattatcccaactcccaccccttggctctcagtgttgcatctcccacagaggtaaagttgtgccattttcccacggctttaaacaaagcaaaacaaaaccaccaatcctaataacccccctccctgccccgtctccacgctgtgcggagagggctctagcccctcagtcggacttctccttctccttcatgtgcaagaagacgatgctgaagatgaagagccccagcatcatggagaaggcgctggcgtagtaggggtaggccgaggggatgaagcgctcatactgcgtgtgctggagtggccgcacggatacctgagtggaagagtacaggtgtgtgtagcctagccggttgtaatccactttaaactggaatacaccatacacgtcgggcaacttgaactgaacactgtatttgccacctttcttc

SEQ ID NO: 927 - DNA, 520 bp, Homo sapiens
ccaggctagtctcgaactcctgacctcaggtgatctgcctgcctcggcctcccaaagtgctgggattaccggcgtgagccaccatgcctggccttacattttttaaaatgagggaacaaatgaataaatgaccaccatgttaggggctggctctgaacagaattgtaaagtgggccaagcttgctctcaaggtcaccttaagcccacggttgctgtgtcctgccctctcagggtcatttcccagcctccaggcacctgttcacagaggctgcatctggcctcgcctccacccctccatcctaaggtgctccgctgacttagaacaggacagtcagggagagaatgtgtctcaggagggtggagtcagatgatcacggccttcctggcatctgaggggatacagcttcgggtagcaaagtgtgattttccctgagccccaggaaagcttggccttggtcagaatacattgaaccctgagggccagagagtccctggggcaagctctgagagggaggacctc

SEQ ID NO: 928 - DNA, 492 bp, Homo sapiens
ctgagctttcagcagataaatcacagcagaaatagaatcaccctaggactttcaatcaaaagctggaagtccaccttacagaaagacaaaaagaaacccctttttatatcttaacaaagcaatagctctcaagcagcagagcatctcgaggaagaaagcttgcccggtcgccatcccatcatgccagagcgtgcagtgtccacccttgactacgctggggaattgctgattttttgaaaaagcttaacttaacaatttctgatgtctatcttttagagttctgtatgttcccattttttattcttctgaattttgaattgcaagtagctgtaaaatccaatctctgagtgcatgggggtgggtgtgaggcggggctcagcttcaaccccctgtcctgtaaagcagtggctggtttttcctgagcccagccctgggaggtcgtggtaggtgtggaggctgcagagctcctccagatgctgccctcgctgtgcc

SEQ ID NO: 929 - DNA, 209 bp, Homo sapiens
ttttttcaccatctaacaaaggcactttattgcattaccattcacaattaacagtcaagaacaaataataataacaaataaaataacttttaagaggacaaggcattagaaataaaaaaggacactaataacatttgtaaaagcttgtactggatgtggttgcccccatttgtgtgtgtggttgtgtgtgtgtggttgtgtgttggtgg

SEQ ID NO: 930 - DNA, 617 bp, Homo sapiens
cgcgtcctttaacaagccccgttctcaaaaggctgggggtatttatataagaacttattccaaagtgactctaagatccatgttcccaagatctagtacgggctattcatggttctgaggcatgtccagcatgcaggcaaacttatctgttcaaattgaggtaaaacagacaaaaaacacttaatattaacagaagctacataattaaaactaaccttctgctgcttatttaagctaatgatgtattcttaccaaacagagaccctcaagtcaatcatttcttttgattttagttaccacccccaaattaagcctcttctttcaaagccattattagttaaaaaaaagttttaaaatgaagaaaaatattttttccagaacttgtattttgtaattagtgtgatgcaatttctttttatttttcaaacttagaaataactcatgtatggtactatttggtatttttttcagataccaaggaataccgacaggattcataaataggattttctgacactggcaggaaagtctgctaacgtttacaaaataccaaagactcttctttcaagcttcaaagatggctgagaattaacagttatgattagtttttcagtaca

SEQ ID NO: 931 - DNA, 521 bp, Homo sapiens
ccaacaaaattggtgaacacatggaagaacatggcatcaagtttataagacagttcgtaccaattaaagttgaacaaattgaagcagggacaccaggccgactcagagtagtagctcagtccaccaatagtgaggaaatcattgaaggagaatataatacggtgatgctggcaataggaagagatgcttgcacaagaaaaattggcttagaaaccgtaggggtgaagataaatgaaaagactggaaaaatacctgtcacagatgaagaacagaccaatgtgccttacatctatgccattggcgatatattggaggataaggtggagctcaccccagttgcaatccaggcaggaagattgctggctcagaggctctatgcaggttccactgtcaagtgtgactatgaaaatgttccaaccactgtatttactcctttggaatatggtgcttgtggcctttctgaggagaaagctgtggagaagtttggggaagaaaatattgaggtttaccatagttacttt

SEQ ID NO: 932 - DNA, 197 bp, Homo sapiens
ccttgtgaccaattacatatgattaaaattacttcccacattcacatccacagtactcgtccaccatttaacatctcaaccaaaacgttacacatgtgaaacaatcactaacaggcaaaaatactaaacctgtatatttggtattgcaaatacacttatgcatgagcaagcaagggattcacagtgagaatctacag

SEQ ID NO: 933 - DNA, 610 bp, Homo sapiens
cctcattttaacaatatcttttttttgctcttctgcttccaaaccttatttgccaatgtaatgcctttatataaagttcttatgatgaatgaaaaactttcaagtgctgttgcctcattaaatgcattatttattaatttaacttctagtactctcgataaagagccagtgaaatgagttattgagttccagggaaaaaaatgagaacataattttgaatttattatctctctatacacacacagttcataattggattacatataataataatatcaacaagtctatcagtatcgaagttggatactggtaatttctcatgtgaggctcttgtgtcacagtcagcatagatttctggagcatttgtctgttgatcttttggtggcctcaaacctcattaagtggtgtgggagatgctgtttctgccatgtgagaatgtgatggcagaattaacacaaccccaccaggggtacaacagagcactttacatccaaaggcagagagggacacagcaatgcagaattccagcacacttaagaggagcaccatgccatccagacccattaagatggacatagtcccatgacaattatttgagttgccatagtag

SEQ ID NO: 934 - DNA, 384 bp, Homo sapiens
ctgctaccaggggagcgagagctgactatcccagcctcggctaatgtattctacgccatggatggagcttcacacgatttcctcctgcggcagcggcgaaggtcctctactgctacacctggcgtcaccagtggcccgtctgcctcaggaactcctctgagtgagggaggagggggctcctttcccaggatcaaggccacagggaggaagattgcacgggcactgttctgaggaggaagccccgttggcttacagaagtcatggtgttcataccagatgtgggtagccatcctgaatggtggcaattatatcacattgagacagaaattcagaaagggagccagccaccctggggcagtgaagtgccactggtttaccaggcag

SEQ ID NO: 935 - DNA, 125 bp, Homo sapiens
  misc_feature 1, 23, 24: n = A,T,C or G
nttaaaattcatggaagtaatannacagtaataaaatatggatactatgaaaactgacacacagaaaaacataaccataaaatattgttccaggatacagatattaattaagagtgacttcgtta

SEQ ID NO: 936 - DNA, 546 bp, Homo sapiens
  misc_feature 519: n = A,T,C or G
gcccatgccagcgtgtggtcagcacgcacaacttgtggctgctgtccttcctgaggaggtggaatgggagcacagccatcacagacgataccctgggtggcactctcaccattacgctgcggaatctacaaccccatgatgcgggtctctaccagtgccagagcctccatggcagtgaggctgacaccctcaggaaggtcctggtggaggtgctggcaggttctcccgccaaggttctccccctgcctcgaggaggaaggggctggaggctcatggctctgcctcccatagaccccctggatcaccgggatgctggagatctctggttccccggggagtctgagagcttcgaggatgcccatgtggagcacagcatctccaggagcctcttggaaggagaaatccccttcccacccacttccatccttctcctcctggcctgcatctttctcatcaagattctagcagccagcgccctctgggctgcagcctggcatggacagaagccagggacacatncacccagtgaactggactgtggacctc

SEQ ID NO: 937 - DNA, 550 bp, Homo sapiens
caccaatcaaaattcctgttggtcctgagactttgggcagaatcatgaatgtcattggagaacctattgatgaaagaggtcccatcaaaaccaaacaatttgctcccattcatgctgaggctccagagttcatggaaatgagtgttgagcaggaaattctggtgactggtatcaaggttgtcgatctgctagctccctatgccaagggtggcaaaattgggctttttggtggtgctggagttggcaagactgtactgatcatggagttaatcaacaatgtcgccaaagcccatggtggttactctgtgtttgctggtgttggtgagaggacccgtgaaggcaatgatttataccatgaaatgattgaatctggtgttatcaacttaaaagatgccacctctaaggtagcgctggtatatggtcaaatgaatgaaccacctggtgctcgtgcccgggtagctctgactgggctgactgtggctgaatacttcagagaccaagaaggtcaagatgtactgctatttattgataacatctttcgcttcaccca

SEQ ID NO: 938 - DNA, 192 bp, Homo sapiens
  misc_feature 28, 63, 148, 153: n = A,T,C or G
tttttttttttttttttttttttttttnggaaaaagcccaaaaggcactttattggaggtctntgcctccattcacaggaaaaaggagctgggagccccatcctaagggtcccagcatcagcccactggagggcctggaacagtccancactntgtgggaaaggagtggggaggggaatgttttaaaaaaaa

SEQ ID NO: 939 - DNA, 337 bp, Homo sapiens
ccaaaatattggaacacacagaaccaaaccaggtgtgttctacacctgcatgagtgaaggatttccacgtagacacctaggaagagcccgcatgccctagactcactccagaggaaggattgatttgcaaccagaaagggagctgaaaaccacggagctccatggctcttcattcaaaagggaaaataatgattccacgttgctttttagagttcaaatcaacatctttctggataaatctattttttaacaatctttttattatttgtaaaagatataaaaacaactcccatcagtagcaatacaaggttatacattttaaccagattttctcagg

SEQ ID NO: 940 - DNA, 362 bp, Homo sapiens
cctgtccaaacgtgcgcaccaggaccgaggggagctccctcccaacacctgctaggaattgccaacttttaaatggatggggttttttatgggttgaacctctgttaatacttttgtacactctcactacagtttatatttttataggctattttctcaaggtgtttctagattccacatatctattttatataacaagttattatgttatgtgtgtgactcccttgtgtgtatctgtgccagcctcagcctccgagttgcttttccctctggccctgactctcactgactcaccgatgtggtgtgcaggcccacttcttaccccagatagcctcgggcgctgcctgtagtcatgccgacag

SEQ ID NO: 941 - DNA, 216 bp, Homo sapiens
ctggacatctttccagcccgggatacctaccatcctatgagcgagtaccccacctaccacacccatgggcgctatgtgccccctagcagtaccgatcgtagcccctatgagaaggtttctgcaggtaatggtggcagcagcctctcttacacaaacccagcagtggcagccacttctgccaacttgtaggggcatgtcgcccgctgagctgagtgg

SEQ ID NO: 942 - DNA, 324 bp, Homo sapiens
ctgattggcttcaggccccctacctctataaactctaccagcattactacttcctggaaggtcaaattgccatcctatatgtctgtggccttgcctctacagtcctctttggcctagtggcctcctcccttgtggattggctgggtcgcaagaattcttgtgtcctcttctccctgacttactcactatgctacttaaccaaactctctcaagactactttgtgctgctagtggggcgagcacttggtgggctgtccacagccctgctcttctcagccttcgaggccagggagcctcaaatcttcagtctctcagagaccacag

SEQ ID NO: 943 - DNA, 597 bp, Homo sapiens
ctgacaaaattcctgggttactaggtgtctttcagaagctgattgcatccaaagcaaatgaccaccaaggtttttatcttctaaacagtataatagagcacatgcctcctgaatcagttgaccaatataggaaacaaatcttcattctgctattccagagacttcagaattccaaaacaaccaagtttatcaagagttttttagtctttattaatttgtattgcataaaatatggggcactagcactacaagaaatatttgatggtatacaaccaaaaatgtttggaatggttttggaaaaaattattattcctgaaattcagaaggtatctggaaatgtagagaaaaagatctgtgcggttggcataaccaaattactaacagaatgtcccccaatgatggacactgagtataccaaactgtggactccattattacagtctttgattggtctttttgagttacccgaagatgataccattcctgatgaggaacattttattgacatagaagatacaccaggatatcagactgccttctcacagttggcatttgctgggaaaaaaagagcatgatcctgtaggtcaaatggtgaat

SEQ ID NO: 944 - DNA, 359 bp, Homo sapiens
ctggaagaggaaaaggagatactgcagaaagaactctctcaacttcaagctgcacaggagaagcagaaaacaggtactgttatggataccaaggtcgatgaattaacaactgagatcaaagaactgaaagaaactcttgaagaaaaaaccaaggaggcagatgaatacttggataagtactgttccttgcttataagccatgaaaagttagagaaagctaaagagatgttagagacacaagtggcccatctgtgttcacagcaatctaaacaagattcccgagggtctcctttgctaggtccagttgttccaggaccatctccaatcccttctgttactgaaaagaggttatcatctgg

SEQ ID NO: 945 - DNA, 367 bp, Homo sapiens
caggatctgaagtttggggtcgagcaggatgttgatatggtgtttgcgtcattcatccgcaaggcatctgatgtccatgaagttaggaaggtcctgggagagaagggaaagaacatcaagattatcagcaaaatcgggaatcatgagggggttcggaggtttgatgaaatcctggaggccagtgatgggatcatggtggctcgtggtgatctaggcattgagattcctgcagagaaggtcttccttgctcagaagatgatgattggacggtgcaaccgagctgggaagcctgtcatctgtgctactcagatgctggagagcatgatcaagaagccccgccccactcgggctgaaggcagtgatgtgg

SEQ ID NO: 946 - DNA, 335 bp, Homo sapiens
ccacagaggtggtattacaaaatatacaaagtggtttctttctttacatttcatagaagaagcctgcctcatttccaaatgagagcactagaagcacaaatcatgcagaccatttactatataacttatgaaaaatgctgtacagggctgtgactatagatatagagtatttggctctgtttgggaattgatatctacaagggggagggtcaggggaggactgtccgatatcctgacttgctgggatggtggagaagctgggatgggggaggccccaatcttgctgcacggctacacccactcctcctttcctagacaaggctggagcgcactgg

SEQ ID NO: 947 - DNA, 384 bp, Homo sapiens; identical to SEQ ID NO: 850

SEQ ID NO: 948 - DNA, 173 bp, Homo sapiens
ctgtggaggggacactgtctttgaggcatcactggttccacaaagggtaggggaaggtcttgagggaccaccccatgccctcattaatcaaccagaagcttggcctggagcagcagcggggattccagtagctgtgggcatacaggatgctagggcggccacaacccaggcag

SEQ ID NO: 949 - DNA, 211 bp, Homo sapiens
  misc_feature 13, 14: n = A,T,C or G
ccatccacgttgnnaaacagaataaaatggaaattcaccttgtcatctacccgacattggccttcctgtgccacggcatcatgggctgcctgtatggcctcattcttttcaaagcattttgctctgtcttcaggggacattttctctgtttcagaaagaaactgtttcagaactgatccatcctcaaatcccagtttgtcttgattattgg

SEQ ID NO: 950 - DNA, 382 bp, Homo sapiens
cctcatcgtgagtcaggacgtggtgaaagctgcagtggctgctgtgctctctccagaagaattcatggtcctgttggactctgtgcttcctgagagtgcccatcggctgaagtcaagcatcgggctgatcaatgaaaaggctgcagataagctgggatctacccagatcgtgaagatcctaactcaggacactcccgagttttttatagaccaaggccatgccaaggtggcccaactgatcgtgctggaagtgtttccctccagtgaagccctccgccctttgttcaccctgggcatcgaagccagctcggaagctcagttttacaccaaaggtgaccaacttatactcaacttgaataacatcagctctgatcggatccag

SEQ ID NO: 951 - DNA, 473 bp, Homo sapiens
  misc_feature 421, 456: n = A,T,C or G
cctctctgccaggcaaaggagggagctgcggctctttgacattaaaccagagcagcagagatacagccttttcctccctctccatgaactctggaaacagtacatcagggacctgtgcagtgggctcaagccagacacgcagccacagatgattcaggccaagctcttaaaggcagatcttcacggggctattatttcagtgacaaaatccaaatgcccctcttatgtgggtattacaggaatccttctacaggaaacaaagcacattttcaaaattatcaccaaagaagaccgcctgaaagttatccccaagctaaactgcgtgttcactgtggaaaccgatggctttatttcctacatttacgggagcaaattccagcttcggtcaagtgaacggtctgcgaagaagttcaaagcgaanggaacgattgacctgtgaattctttgccgtctaangcagttgtttatgacag

SEQ ID NO: 952 - DNA, 312 bp, Homo sapiens
ctgatgggtctcatagtcctctgggatggtgtcattgcagcggtaacgcaggttggcccagatgatgttctcctgggagaagcagaagacccccaagcggccaccccgcatggttgtgtccaagaccacgttgctgtcggccaccagctcagggccctcatagaatcgcaccctgatgtagcccacttggggccggtgctgcaggaaccaacgataggacttcttgtccttccaacccacgtttcgcgggtccttccacagcagccgcacctgagactctgtgtctcctgtatgccacagagcgttccgcag

SEQ ID NO: 953 - DNA, 397 bp, Homo sapiens
cgcgtccactgccgaccctcttggtttctgaaaccaacctttcttcctgctctcctctttaagagcaaaccccaacatgtataaggtcacagcaagtggtagccaggaaaagctgtgggacccctcatttgagtcacatccatatggcatggagaaagaaaacctctctgccagaaggaactgaactctggaagtcctaaggaaggtcaccatgatcagcagataggaaagcattgccaagggctgtccctcaagagcttagttttcttagggagaccagaaagacatcagatcctgactgccctgttttgctcaagttctgaaatgagtggcatgatgaagagctggtggagctgagggaaagagtcaaccatgtggggtggggtagtgaggaagg

SEQ ID NO: 954 - DNA, 304 bp, Homo sapiens
cctttgtaccgggccagcaactggaagggcacagtgtggaattccagggcctgcagagtcttcttctggaacagggcctcgtggctccagtacagggacaggttgaactgcagctcaaagagctcctcagggagcatcatggggaagcggatcttctccaccaagccctccacctcctcatgggaggcacgctccccccagctccaggtgtccacggccttcagtagggccagctcgctgggcaccgccaggtcgctcctgggcagcagcagttggagcaggtctgtggggacactgggccagg

SEQ ID NO: 955 - DNA, 156 bp, Homo sapiens
ctgtttcaactccctgccaagaaaaatgtagatgcaattctggaggagtatgcaaattgcaagaaatcgcagggaaatgttgataataaggaatatgcggtcaatgaagttgtggcaggaataaaagaatatttcaatgtgatgttgggcactcag

SEQ ID NO: 956 - DNA, 543 bp, Homo sapiens
ctttcatctgaccatccatatccaatgttctcatttaaacattacccagcatcattgtttataaccagaaactctggtccttctgtctggtggcacttagagtcttttgtgccataatgcagcagtatggagggaggattttatggagaaatggggatagtcttcatgaccacaaataaataaaggaaaactaagctgcattgtgggttctgaaaaggttattatacttcttaacaattctttttttcagggacttttctagctgtatgactgttacttgaccttctttgaaaagcattcccaaaatgctctattttagatagattaacattaaccaacataattttttttagatcgagtcagcataaatttctaagtcagcctctagtcgtggttcatctctttcacctgcattttatttggtgtttgtctgaagaaaggaaagaggaaagcaaatacgaattgtactatttgtaccaaatctttgggattcattggcaaataatttcagtgtggtgtattattaaatagaaaaaaaaaatt

SEQ ID NO: 957 - DNA, 528 bp, Homo sapiens
ctgtgatcaagatgtattaaaagaatatgaaagagcatctgggttattctagaagttctgtgatcaaaacatattaaaaaaaattaaagcgcatctgggttattctagaagttcctgggctttatacttggatatttacagaggaagttgaacttcaagttctgccactcttcaaaatgggtgacaggagaggacgtgataggacagttaaaaaaaaattgatagtcattctctgatggagtgaagcaagctttgtcaaccatcaacaaatatgacttcattggtcacaagccctgcagagatccaacaagatttgagttttaaatacagaacatatttcaaacagaaccagcagagtgctgatgtatgaatggaattgattgctgaaggcagagagtataaagaatctcaagaaacttttagtgccattttcatttaataagccattggtatagcaacctaaaaaccttggctgtgatgacaccaggatgtgtttatggaattgctgcaggagaacacaattggcag

SEQ ID NO: 958 - DNA, 451 bp, Homo sapiens
ctgtctgaccatggggaccttctgtctgaagaggagctggatgaatgagactctgggaatcatctacacaggaccaaacccaacaggcgccctggcaccggggaggcgggtagttgtactctgcttgtacagtccttgagcccagtttacagatctggagagcaggaggccaggacaaggacaaaggctggaggatggagtaggacccaggggctctgccatcctaggcatcattcaaggtcttttatgaagactttacagatgtcctctgtaagtagcatcgagagtggagttcagctcctttctctacttttttttggtctgatggcacatatttattgttctgtggtctaatcacagtgtttctaaatgtaaaaagtgcatatgttggtgtagctagtcccgcgacattgagctcctctgcatgaagacactgggctcctgcatccag

SEQ ID NO: 959 - DNA, 158 bp, Homo sapiens
ccagaccaaggctgctggacctatgggaatattcgggtgtctgtagaggatgtgactgtcctggtggactacacagtacggaagttctgcatccagcaggtgggcgacatgaccaacagaaagccacagcgcctcatcactcagttccactttaccag

SEQ ID NO: 960 - DNA, 235 bp, Homo sapiens
ctgagcagggaatccggccggaggaaggagcagcttaccgactgcgggtgttcaccacaggccaggccctaatatgcacccactagtttagctcagactcctctctacatatgaatggcaaaggcacttttgatatacactgtaaaatacactgtattttagaatcggaatctattttctaatgttcccctcaagggctgagtggcaggaaggttgaggatgcaggactttgcag

SEQ ID NO: 961 - DNA, 375 bp, Homo sapiens
cctggaaagaaaagggatatgtccagcgacttggagagagaccatcgccctcatgttagcatgccccagaatgccaactaaactcctccctttccttcctaatttcccttcttgcatccttcctataacttgatgcatgtggtttggttcctctctggtggctctttgggctggtattggtggctttccttgtggcagaggatgtctcaaacttcagatgggaggaaagagagcaggactcacaggttggaagagaatcacctgggaaaataccagaaaatgagggccgctttgagtcccccagagatgtcatcagagctcctctgtcctgcttctgaatgtgctgatcatttgaggaataaaattatttttccc

SEQ ID NO: 962 - DNA, 409 bp, Homo sapiens
  misc_feature 14, 26, 73, 74, 81, 103: n = A,T,C or G
ctggggaggccccncgggcctctcangtggacaggtccaggcattggttgaagctggatgaagctggggcctnngctcctnctcatcaaatacagatcactgngaccctgtcctcctccatggtgctggtctcctcggccccactgcccctgcttctgctttcttcctccacctcctcctcccccagctccatgtccagctcgttgcctgcctctgagggtgtgtaggtggagccactgatggaacggcagctaaagaagacgattcgcttgagccgcttgttgtagaagaagtagttgaaggaccagaggctaccatcctccccgaagggatctgagtccaagtctgggttatagctgtagatgtcacattcagccaggcagatctcctcgtccaccgcgttccacag

SEQ ID NO: 963 - DNA, 163 bp, Homo sapiens
gccatggcgtcctatttcgatgaacacgactgcgagccgtcggaccctgagcaggagacgcgaaccaacatgctgctggagctcgcaaggtcacttttcaataggatggactttgaagacttggggttggtagtagattgggaccaccacctgcctccaccag

SEQ ID NO: 964 - DNA, 344 bp, Homo sapiens
ccactggctgagttattggcctggcaggtatagagtccgctgttcttctcagtgatgttggagataaagagctcttgtgtgtgttgctggatgttcccatcaatcagccaagaatactgtgcaggtgggttagaggctgcatggcaggagaggctgaggttcacccctggacggtaataggtgtatgagggggaaatggtggggtcgtctgggccatagaggacattcaggatgactgggtcgctgtggtcaacacttaattcgttctggattccacactcatagggtcctacatcattccttgtgacactgagtagagtgagggtcctgttgtcattggacag

SEQ ID NO: 965 - DNA, 461 bp, Homo sapiens
ctgagctttcagcagataaatcacagcagaaatagaatcaccctaggactttcaatcaaaagctggaagtccaccttacagaaagacaaaaagaaacccctttttatatcttaacaaagcaatagctctcaagcagcagagcatctcgaggaaggaagcttgcccggtcgccatcccatcatgccagagcgtgcagtgtccacccttgactacgctggggaattgctgattttttgaaaaagcttaacttaacaatttctgatgtctatcttttagagttctgtatgttcccattttttattcttctgaattttgaattgcaagtagctgtaaaatccaatctttgagtgcatgggggtgggtgtgaggcggggctcagcttcaaccccctgtcctgtaaagcagtggctggtttttcctgagcccagccctgggaggtcgtggtaggtgtggaggctgca

SEQ ID NO: 966 - DNA, 246 bp, Homo sapiens
cctttcacagacactaccattgagtgggttgatgcaggttgcagccttcagtccccgagtactgggttctgataaaattccacagaatccagcatcactgggctcagacggcatccactgtagtaaactatttgtaaatggggacatatcttcccagcaccagtaggacacattgatcttccgaaggccgacccatggggttaaggtgagcttggacatgctctgagatgactgcattattcgcag

SEQ ID NO: 967 - DNA, 244 bp, Homo sapiens
ctggagcattggcagggacagtcagaaaggagacaagtgaaaacggtcagatggacacaggcggaggagaaaagacagagggagagagaccatcgggaacaatcagaggggccgagacgatcagaaaagggtcagcccgagacaggctgagccagagtttctagaagcagtttccaattcaacggctcgctttgagggccaacgtgtcctaggccgaggctgcagaagcgctcacacactcacg

SEQ ID NO: 968 - DNA, 436 bp, Homo sapiens
ccaaagtctttaccctatttaaccccttgtatatttctgactgctcactgttcatattataggggaccagatttgtaatatagaattctccataacatgaatgaaattaatgctgtccaagccagcatggtggcttcatattaagtagtaacagaagtctgaacaattggataaatttgacttccaagacagctaaacttttcaactgcaattttaaaaactacactacactgttatagttaatctgacaaaaatgtcctcaaagagtactttattttatttaaagcatctgtttaattcaacctttaataattttgcaaagaagggtacgtgtgtattttaatatagcctgacctgaatttatatgtttttagctttagtatttaactttttgtaacaaataaaccttttttaaaacaagtttaaaaaagaaaaa

SEQ ID NO: 969 - DNA, 383 bp, Homo sapiens
ctggctcccttgtctccagggctttggaggatcagggtagggagggctctgtctctaagccaggtgtcaggatcagaatcatgggtagaaggtgccattcagctcacagccgcacccagaatcctttgcagccctccttctttatttttttcccattgcattctgggagtccacatctggctttctcagccactgttcatcaccaggggttttaggaggaaggcttggctcctgtcttcccagacccaccatgcctggagaggtcaggatggaactacctcattcggcgaattagccccaaattgaacgctgaatcgtgtcccatgagatcaggcgccatctgtaaagtctcctctggaaatgccaatccatccttcccccag

SEQ ID NO: 970 - DNA, 543 bp, Homo sapiens
ctgtagcttttgtgggacttccactgctcaggcgtcaggctcaggtagctgctggccgcgtacttgttgttgctttgtttggagggtgtggtggtctccactcccgccttgacggggctgctatctgccttccaggccactgtcacggctcccgggtagaagtcacttatgagacacaccagtgtggccttgttggcttgaagctcctcagaggagggcgggaacagagtgaccgagggggcagccttgggctgacctaggacggtcagcctggtccctccgccgaacaccgaagtgctactgtttgtatatgagctgcagtaataatcagcctcgtcctcagcctggagcccagagatggtcagggaggccgtgttgccagacttggagccagagaagcgattagaaacccctgagggccgatcagtgacatcataaatcatgagtttgggggctttgcctgggtgctgttggtaccaggagacatagttataaaaaccaacgtcactgctggttccagtgcaggagatggtgatcgactgt

SEQ ID NO: 971 - DNA, 416 bp, Homo sapiens
ccagactgacttcaaaaaattaatgtgtatccagggacattttaaaaacctgtacacagtgtttattgtggttaggaagcaatttcccaatgtacctataagaaatgtgcatcaagccagcctgaccaacatggtgaaaccccatctgtactaaacataaaaaaattagcctggcatggtggtgtacgcctgtaatcccagtgacttgggaggctgaggcaggagaatcgcttgaacccgggaggcggaggttgcagtgagctaagatcgcaccactgtactccagcctgggcaacagcgagactccatctcaaaaaaaaaggaaatgtgtatcaagaacatgattatccaggggtattttctaattcagatcatcaaactgattatatagaagagttggctttaaaatgtttgca

SEQ ID NO: 972 - DNA, 242 bp, Homo sapiens
ccaaaaatcccaaaacatcattttcaatcagtagagaagtgcttagggttgaaaattgatttcatttgctactgaatttggtaaatcctgggtaacttttatcaagatgaagacattttaccctacctactctagaaatatacaacaatgttatattttacactccttggaaacatttgaggaaaaaaatgcaatttgcacttcactttgttggaatatcccatagcactcaataaactcag

SEQ ID NO: 973 - DNA, 347 bp, Homo sapiens
cctgcaggggatggaaccttccagaagtgggcggctgtggtggtgccttctggagaggagcagagatacacctgccatgtgcagcatgagggtctgcccaagcccctcaccctgagatgggagctgtcttcccagcccaccatccccatcgtgggcatcattgctggcctggttctccttggagctgtgatcactggagctgtggtcgctgccgtgatgtggaggaggaagagctcaggacattttcttcccacagatagaaaaggagggagttacactcaggctgcaagcagtgacagtgcccagggctctgatgtgtctctcacagcttgtaaagtgtgagacag

SEQ ID NO: 974 - DNA, 571 bp, Homo sapiens
gaaagagcgagatgcgagaacacttttggctaaaaatctcccttacaaagtcactcaggatgaattgaaagaagtgtttgaagatgctgcggagatcagattagtcagcaaggatgggaaaagtaaagggattgcttatattgaatttaagacagaagctgatgcagagaaaacctttgaagaaaagcagggaacagagatcgatgggcgatctatttccctgtactatactggagagaaaggtcaaaatcaagactatagaggtggaaagaatagcacttggagtggtgaatcaaaaactctggttttaagcaacctctcctacagtgcaacagaagaaactcttcaggaagtatttgagaaagcaacttttatcaaagtaccccagaaccaaaatggcaaatctaaagggtatgcatttatagagtttgcttcattcgaagacgctaaagaagctttaaattcctgtaataaaagggaaattgagggcagagcaatcaggctggagttgcaaggacccaggggatcacctaatgccagaagccagccatccaaaactctgtttgtcaaa

SEQ ID NO: 975 - DNA, 221 bp, Homo sapiens
  misc_feature 15: n = A,T,C or G
ctggaggtgcctcanaaggtgcattctgcttcctgcaggggcttgaaacaccaaggcactccagggatcctggagtcaaagcagcagccccggttgttgcactccttgggggtgacatgggggtagccgcagtccaccctgtccttggctggcacggcacactggtttgcagacaggcccacgtactcctcagcagagctggaggacagcaaggccaggac

SEQ ID NO: 976 - DNA, 316 bp, Homo sapiens
ccatcagattgtcacagacttttataaccctttgatccctaccaacgttaagtatgagtttggccctgccatcttcattggctgggcagggtctgccctagtcatcctgggaggtgcactgctctcctgttcctgtcctgggaatgagagcaaggctgggtaccgtgcaccccgctcttaccctaagtccaactcttccaaggagtatgtgtgacctgggatctccttgccccagcctgacaggctatgggagtgtctagatgcctgaaagggcctggggctgagctcagcctgtgggcagggtgccggacaaagg

SEQ ID NO: 977 - DNA, 335 bp, Homo sapiens
cctgtttgtctgtacagcaatgcagatgcgcaggcccatcctggtggaggacccagatgcagggagcaaatattcgggttgtgttgctaagagtcgcaggaactactgctagtgatactaggcttgctgcaggaggatgtcacgctgagaaagggagatgactaggagcagaaaaagtactctcactgttccagcttccagcccaatcctagcagaatgaatgcattttaaaatcagtccacattcacatgtgctgagaaggttgttagtggtccctcatctgggcaaagcagacccaagatggtgctaagtgcagagtgcagagcattcttgtg

SEQ ID NO: 978 - DNA, 280 bp, Homo sapiens
cctaacacccaagctcttccttgcagaagagctgagatgctaaggagaccatctggagtgtcataataagcccttgggatttgctgagctcccacatggctttcttcaaccacctggcccactttcttcaaccacattccactttggaatgcgtgtctttaaggcaccaagtgatcttaagaatgggctctgtttttgaattcagcaatccaagttcctatctatctcggtgggacctccaaaaaaaagaaaaaggattggcttggcttctaatgtaagg

SEQ ID NO: 979 - DNA, 318 bp, Homo sapiens
ctgtccagatgacagtaagattccactgtctgtaatcctcatggtgccaggtctcctggggcatctagggcaatgatgctactgcagtttatgcagttacacagtcaagtctgtgccaaaggaggtcccatccggcggccaggtttctgttcagtctggggagcaatgccaactggctgcccccatagcctggcatgagctgatggcccagtgcaatcccaaagcaaagaagggcagaactgggccaagaagctgtggtaatttgctctccctgcctccgacagcgtcgtcctctccttttgcagccccacacgcagg

SEQ ID NO: 980 - DNA, 568 bp, Homo sapiens
ccagcactggctccttgatggttttcctaggacattaggacaagccgaagccctggacaaaatctgtgaagtggatctagtgatcagtttgaatattccatttgaaacacttaaagatcgtctcagccgccgttggattcaccctcctagcggaagggtatataacctggacttcaatccacctcatgtacatggtattgatgacgtcactggtgaaccgttagtccagcaggaggatgataaacccgaagcagttgctgccaggctaagacagtacaaagacgtggcaaagccagtcattgaattatacaagagccgaggagtgctccaccaattttccggaacggagacgaacaaaatctggccctacgtttacacacttttctcaaacaagatcacacctattcagtccaaagaagcatattgaccctgcccaatgggagaaccaggaagatgtggtcattcattcaatagtgtgtgtagtattggtgctgtgtccaaattagaagctaactgaggtagcttgcagcatctcttctagttgaaatggtgaactgataggaaaaca

SEQ ID NO: 981 - DNA, 550 bp, Homo sapiens
ccatccccctttagaacgtatcttaatgtgaacataaattgttcttcatgatgcttaaaagcttacatataattttcattcttagaaaaacgccacattttggatcctggatttttctgaatatcatgattgaaaaaaacaaaacaaaaaatgaacccaaatcaaagtgtggttaaacttatatgagaaagatttttcaaccagatggtcattcaaaaaagttggagctgtaagtgccggcgactgaggacacagggttaattcctcgctgctggtggaaggctagagaacatcttcaaaagagggtagcaagacgtgctcctaggggaggctcagtgtggtctcgtctgcccaagcattttcagtcttgcttggtcaatgacatcgagtaagtttttggcatccacagccagggcgtgagcagcagtcagcatttgctttttgtactcttgctggaggctggtcatgacatactgctgggccagtttcatcttgttgatgagctcacccaggtcagagttcaatagcttctgtgccatctcaatctctc

SEQ ID NO: 982 - DNA, 524 bp, Homo sapiens
ccaaggtcagaggctgatgcaacaggccctcttctccccagggccaggctcctgtccagcctgggcactgcccagagtgatggcattggtccggatgctgttctgtctctgcttggacaccttcgcaaagatttctttcaggacagtctcaaaggctagctcaacattggtagagtccagggctgaggtctccaggaagagcagtccattgttttcagcgaacattcgggcctcctcagtgggcacttcccgggcctggctgaggtcacttttgttacccacgagcatgacgacgatcgtggcttcagcatggtcatagagctccttcagccatcgctccaccacagcataggtctggtgcttggttaggtcaaacaccaggagggcccccactgcaccacgatagtacccttgaagacaaagttataatcttcctcagttccattccccatcttggctccgcatggagggtgcaggtgtcttcggggacagaggcgacaaatctgtgtgttggctcaatgccc

SEQ ID NO: 983 - DNA, 140 bp, Homo sapiens
ccttcgtgccctaacagccagtcccctgttaaagtggaagagacctgtggctgccgctggacctgcccctgtgtgtgcacaggcagctccactcggcacatcgtgacctttgatgggcagaatttcaagctgactggcag

SEQ ID NO: 984 - DNA, 358 bp, Homo sapiens
tggagcggccgcccggcaggtccaacgagtcacaacagtgcaataggtagaggattaaaaactgcatcaaacaggtgctgaaaataaatactacctaggagaaggaggtgagagccctcgtgtggggtttgttttcgaccccttgagtgtgtgtggggtttgtcttccgagccacgagcctggcctgtctcgcggtgctgttcactctgacagagtgcgcctgcagcacgttgcctccagggcccagcctcccagaagcctcagagcatcagagcatccgtcccatcggatggaccagaaacaagaaaatggggtggggtgaatcacagctatcattcaaaggaaaggaatttttttc

SEQ ID NO: 985 - DNA, 450 bp, Homo sapiens; identical to SEQ ID NO: 830

SEQ ID NO: 986 - DNA, 340 bp, Homo sapiens
cctcctgccagcagttcttgaagcttctttttcattcctgctactctacctgtatttctcagttgcagcactgagtggtcaaaatacatttctgggccacctcagggaacccatgcatctgcctggcatttaggcagcagagcccctgaccgtcccccacagggctctgcctcacgtcctcatctcatttggctgtgtaaagaaatgggaaaagggaaaaggagagagcaattgaggcagttgaccatatccagttttatttatttatttttaatttgtttttttctccaagtccaccagtctctgaaattagaacagtaggcggtatgagataatcagg

SEQ ID NO: 987 - DNA, 227 bp, Homo sapiens
ccaatgcccggagcaggccctctttccatcccgtgtcggatgagctggtcaactatgtcaacaaacggaataccacgtggcaggccgggcacaacttctacaacgtggacatgagctacttgaagaggctatgtggtaccttcctgggtgggcccaagccaccccagagagttatgtttaccgaggacctgaagctgcctgcaagcttcgatgcacgggaacaatgg

SEQ ID NO: 988 - DNA, 241 bp, Homo sapiens
cctctttttaccagctccgaggtgattttcatattgaattgcaaattcgaagaagcagcttcaaacctgccggggcttctcccgccttttttcccggcggcgggagaagtagattgaagccagttgattagggtgcttagctgttaactaagtgtttgtgggtttaagtcccattggtctagtaagggcttagcttaattaaagtggctgatttgcgttcagttgatgcagagtgggtttt

SEQ ID NO: 989 - DNA, 193 bp, Homo sapiens
ccagccgtgtcccagacttgtagtttgatcttcttcccctctatatccacagtgcggatcttgaaatcaattccgatggtggagatgtaagtgttgttgaagttgtcctctgcaaagcgaatgatcagacaagtcttgcccacccccgagtccccgatcagcagcaacttgaagaggtggtcgtaggctttgg

SEQ ID NO: 990 - DNA, 499 bp, Homo sapiens
cctcaaccaagagggttgatggcctccagtcaagaaactgtggctcatgccagcagagctctctcctcctccagcaggcgccatgcaagggcaggctaaaagacctccagtgcatcaacatccatctagcagagagaaaaggggcactgaagcagctatgtctgccaggggctaggggctcccttgcagacagcaatgctacaataaaggacacagaaatgggggaggtgggggagccctatttttataacaaagtcaaacagatctgtgcgttcattcccccagacacacaagtagaaaaaaaccaatgctgtggtttctgccaagatggaatattcctcctcctagttccacacatggcgtttgcaatgctcgacagcattgcactgggctgctgtctctgtgttctggcaccagtagcttgggccccatatacacttctcagttcccaacaagggcttatgggccgaggggcaggctccaattttcaagcacacga

SEQ ID NO: 991 - DNA, 262 bp, Homo sapiens
ctgccagccaggctgtggtcagtcctctggcaggcaatcttcggcaccgagagcctctgtccattagtgtcagccccgagggggccacgacggaggccgcccaatgtccactgtgatattggtgaagagtggttgccgagacacctccaagacctggtaccgcactgacccaatgccgtcccgcttcatggtcagcttcgtgttttgaatcttggtaaacctctgagggttaggttcgttatgcttgtcgcggtcgtgcttg

SEQ ID NO: 992 - DNA, 535 bp, Homo sapiens
  misc_feature 90, 91, 467, 524: n = A,T,C or G
ctgctgcttgtgaaattcatgtgtggtactaagtaccttacatgaattatttcatttaaccctcccaacagtctcctttgtacgtgctgnnctctctgcctggaaacactgtttcccacccccaacccccaattcttctgtttatttttcttgagacagagtctcactgtgtagcccagactggagtgcagtggcgcgatctcggctcactccaatctccgcctcccgggtccctgttcaagcagttctcctgcctcagcctcctgagtagctgggattacaggcacacgccaccatgtccagctaatttctgtatttttagtagagatggggtttcacgatgttggctaggatggtctcgatctctggtcagagtcttttctgtaaatatccttggtaaagaagcaattttagactgtagctgttgcaaatgctttaaggaagaagcaaaacaactgtcagtcttnctgaaatgaagaaactacaccagggctgctatatcagagcaaccccaaccagcactncaatcatgatg

SEQ ID NO: 993 - DNA, 232 bp, Homo sapiens
ctgctgctctcccctcccagtctctactcactgggatgaggttaggtcatgaggacaccaaaaacctaaaaataaacaaaaagccaaacaagccttagcttttcttaaaggctgaaatgcctggaagtgtccctttatttataaaataacttttgtcatatttcttatacatgtttcttgtaagaaattcagaaactacagacaaagagagtggaaattacccactgtcagg

SEQ ID NO: 994 - DNA, 203 bp, Homo sapiens
ccagcagatcatccacgacgaccaccctctgtcctggctccagggcgtctttctgaatctccagctcagccttcccgtactccagggaataggaggcccacagagtggggcctggcagcttcccccgctttcggatgagcacgcagcccagtccaagctcctgggccagggaggggccaaagaggaagcctcgggagtctagg

SEQ ID NO: 995 - DNA, 238 bp, Homo sapiens
ccatgcctgccccgcccactctgtatatatgtaagttaaacccgggcaggggctgtggccgtctttgtactctggtgatttttaaaaattgaatctttgtacttgcattgattgtataataattttgagaccaggtctcgctgtgttgctcaggctggtcccaaactcctgagatcaagcaatccgcccacctcagcctcccaaagtgctgagatcacaggcgtgagccaccaccagg

SEQ ID NO: 996 - DNA, 379 bp, Homo sapiens
ctgcagcctgggactgaccgggaggctctgaccatttacccaccacaggtaggttgtgttctgaacctcaggttcacaggtgaaggccacagcatccttgtcctccacggggttggagttgttgctggagatggagggcttgggcagctccgggtatacatggaactgtccggttgcttcttcattcacaagatctgactttatgacttgtagggtatagaatcctgtgtcattctgggtgacgttctggatcagcagggatgcattggggtatattgtctctcgaccactgtatgcgggccctggggtagcttgttgagttcctattacatatcctacaattagactgttgccatccactctttcgcctttgtaccag

SEQ ID NO: 997 - DNA, 210 bp, Homo sapiens
ccatccgaagcaagattgcagatggcagtgtgaagagagaagacatattctacacttcaaagctttggtgcaattcccatcgaccagagttggtccgaccagccttggaaaggtcactgaaaaatcttcaattggattatgttgacctctaccttattcattttccagtgtctgtaaaggccgtggagaagtgtaaagatgcaggattgg

SEQ ID NO: 998 - DNA, 207 bp, Homo sapiens
  misc_feature 61: n = A,T,C or G
ggtggctgtgctgggggcgccccacaaccctgctcccccgacgtccaccgtgatccacatncgcagcgagacctccgtgcccgaccatgtcgtctggtccctgttcaacaccctcttcatgaacccctgctgcctgggcttcatagcattcgcctactccgtgaagtctagggacaggaagatggttggcgacgtgaccggggccca

SEQ ID NO: 999 - DNA, 315 bp, Homo sapiens
ccaatgggctttgctgtagcttgctgaaatcaccaagcaggagagatttaaccagaggcgatgtgtccagtcaccagcatagagccatcctctgtgtcaccatccacacgcagggccttctggcagacctcatgcaatgccctccatgttaatattcatcagaaaatggataattaggggggccagcaaaaatatcaagggtcaaatatcgcacatttctgtttaggccatctatggctttcatctcctctgaagtcaactggaattcaaacacctgcacgttctgtctgatgcgctgctcattgtagctcttgg

SEQ ID NO: 1000 - DNA, 186 bp, Homo sapiens
ctgttactcaagaagatgtatttaatgcttgacaataagagaaaggaagtagttcacaaaataatagagttgctgaatgtcactgaacttacccagaatgccctgattaatgatgaactagtggagtggaagcggagacagcagagcgcctgtattggggggccgcccaatgcttgcttggatcag

SEQ ID NO: 1001 - DNA, 173 bp, Homo sapiens
ccacaaagcggaaactcatccacttttgcctttttccgccccaggtcaaaaatgcgaatcttggcatcagggacacctcggcagaagcgagactttgggtacggcttgttcttacaataccggtaacaacgggcggggcggcggcccatggcgacaccaggatcttcagtggc

SEQ ID NO: 1002 - DNA, 302 bp, Homo sapiens
ctgaatgcctgagcccagcagggagctgaggatcatggggtactgggggggcctgaagacgtcgccgtgcaccaacttccacccagactcctccatggtgtcttcaatgtcatcctccttgttgtagttggcaatgtccttccggagggtccgaatgataatcatgctcaggatacctgacaggaagaagaccacaacaacggagttaatgatagaaaaccagtggatctggacgtcactcatggtcaggtaagtgtcccagcgagaggcccatttgatatcactttcctcccagtggacag

SEQ ID NO: 1003 - DNA, 368 bp, Homo sapiens
cctgggcccgctgacttcagggtgaggccacagctactgcagcgctttttatttatttatttatttactgagatggagtcttgctctgtcacccaggctggagtgcagtggtgcaatctcggctcactgcaacctctgcctcctgggctgcagtgattctcctgcgttcaagtaattctcctgcctcggccttctgagtagttgggattacaggcatatgccaccacacttggctaattttttgtatttttagtagaaatggggtttcaccatgttggcgaggctggtctcgaactcccgacctcaaggatcctcctgcctcggcctcctaaggtgctgggattgcaggtgtgagccaccacgtctgg

SEQ ID NO: 1004 - DNA, 294 bp, Homo sapiens
ctgggcggatagcaccgggcatattttggaatggatgaggtctggcaccctgagcagtccagcgaggacttggtcttagttgagcaatttggctaggaggatagtatgcagcacggttctgagtctgtgggatagctgccatgaagtaacctgaaggaggtgctggctggtaggggttgattacagggttgggcacagctcgtacacttgccattctctgcatatactggttagtgaggtgagcctggcgctcttctttgcgctgagctaaagctacatacaatggctttgtgg

SEQ ID NO: 1005 - DNA, 414 bp, Homo sapiens
ctgaagcactcttcagagactacgtccacagacactgatgctgaggcctttcttgtaagtgaagaaaaaggaatgcagcaaagaagagttcgacattggagtccttagttccatcaggatcccattcgcagcctttagcatcatgtagaagcaaactgcacctatggctgagataggtgcaatgacctacaagattttgtgttttctagctgtccaggaaaagccatcttcagtcttgctgacagtcaaagagcaagtgaaaccatttccagcctaaactacataaaagcagccgaaccaatgattaaagacctctaaggctccataatcatcattaaatatgcccaaactcattgtgactttttattttatatacaggattaaaatcaacattaaatcatcttatttacatgg

SEQ ID NO: 1006 - DNA, 272 bp, Homo sapiens
ccggagcccacggtggtcatggctgccagagcgctctgcatgctggggctggtcctggccttgctgtcctccagctctgctgaggagtacgtgggcctgtctgcaaaccagtgtgccgtgccagccaaggacagggtggactgcggctacccccatgtcacccccaaggagtgcaacaaccggggctgctgctttgactccaggatccctggagtgccttggtgtttcaagcccctgcaggaagcagaatgcaccttctgaggcacctccag

SEQ ID NO: 1007 - DNA, 313 bp, Homo sapiens
  misc_feature 14: n = A,T,C or G
cctgccttactctnttccctttccccagggactcttggttttcagaagcccctctggaatgtcctacctggcctaaccccataccagcagtgcagacaaggaggcactcctactatagtgggtccagcccatggagagactcacttcctgccccaacacctcttcccctagaccctgagggccaggacaatgtcttagtgccttccaacttggcagagtgaggccccatgagacagagagaaagggggaagagggaaatacctttatccaaataaatacccatccaaaattatttgtgataggtgaaaaatgg

SEQ ID NO: 1008 - DNA, 317 bp, Homo sapiens
cctcaatgtcgtgctagaggggccgaagaaggccgtgaacgacgtgaatggcctgaagcaatgtttggcagaattcaagcgggatctggaatgggttgaaaggctcgatgtgacactgggtccggtaccggagatcggtggatctgaggcgccagcacctcagaacaaggaccagaaagctgttgatccagaagacgacttccagcgagagatgagtttctatcgccaagcccaggccgcagtgcttgcagtcttaccccgcctccatcagctcaaagtccctaccaagcgacccactgattattttgcggaaatgg

SEQ ID NO: 1009 - DNA, 456 bp, Homo sapiens
tttttttgtagggtatagaaaatacatttttaattttgatagagttcacaaatgacagcattgacatttctttaaacaaatacttctgtcaaggcacagcattaccatgtgtccccagatgcccaagaggcagtgatttcatgtccccctgaggtttagcagagccaccaatgtcaatagggtggctgacggggcctagatttgctaccagataagccaatgagacatgctgtcagatttatggttacataatcaagtatttaaaaagatgcacaataggtaactgcaatgagcttgttctgcatttagcgatagttcctttcaaacaaagaagatagttttcagtatcaagaaggatgcctatatgtatgtcttccatggagcctttcctacaaattgctttcattacacattaaaaggagttcagctttattgtgaccttcttgagtcattcag

SEQ ID NO: 1010 - DNA, 196 bp, Homo sapiens
ctgggcatgggctgaggagaggtcttgcttgcccccttcaactttccatctcagaactataaactgctaggctgcaaggagagaagggctaagtgggggtcagacaggagagaagggcaggaggcagtgagccccgatgacccaccaactccaccaggccctgacagggaagcccctttggttagtatcattttgg

SEQ ID NO: 1011 - DNA, 449 bp, Homo sapiens
ccttgcggctgctgcgaaaggccacggcgctgcctgcccgccgggccgagtactttgatggttcagagcccgtgcagaaccgcgtgtacaagtcactgaaggtctggtccatgctcgccgacctgaaggagagcctcggcaccttccagtccaccaaggccgtgtacgaccgcatcctggacctgcgtatcgcaacaccccagatcgtcatcaactatgccatgttcctggaggagcacaagtacttcgaggagagcttcaaggcgtacgagcgcggcatctcgctgttcaagtggcccaacgtgtccgacatctggagcacctacctgaccaaattcattgcccgctatgggggccgcaagctggagcgggcacgggacctgtttgaacaggctctggacggctgccccccaaaatatgccaagaccttgtacctgctgtatgcacag

SEQ ID NO: 1012 - DNA, 289 bp, Homo sapiens
  misc_feature 274, 275: n = A,T,C or G
ccaggaccacaaccccacgctgtagctggtagcgcagggcaatcagggctggggttcgcttgtgcttttttgccaaggcacaaaggactgggtcctccaagagcaccggggagttcgggtccacccatggttcttctcggtgggatcccagagcactataggcaaccagaacaatgtcttttgacttgcagaaatccagcagttttctctggttgaagtaaggatgacattccacctggttgcagacaggcttgtacttgagccctggcttgtnnaggatcatctccag

SEQ ID NO: 1013 - DNA, 221 bp, Homo sapiens
  misc_feature 98, 99, 132, 133, 180: n = A,T,C or G
tctgtaaatgctgcgttcctaatttagtaaaataaaagaatagacactaaaatcatgttgatctataattacacctatgggatcaataagcatgtcannactgattaatgtctactgtaaaaatttggtagnnaaattttcatttgatattagatataaatatctgaatataaataattntaatatactagtcatgatgtgtgttgtattttaaaaattat

SEQ ID NO: 1014 - DNA, 512 bp, Homo sapiens
gggcccccgaagcctctacaatgggctggttgccggcctgcagcgccaaatgagctttgcctctgtccgcatcggcctgtatgattctgtcaaacagttctacaccaagggctctgagcatgccagcattgggagccgcctcctagcaggcagcaccacaggtgccctggctgtggctgtggcccagcccacggatgtggtaaaggtccgattccaagctcaggcccgggctggaggtggtcggagataccaaagcaccgtcaatgcctacaagaccattgcccgagaggaagggttccggggcctctggaaagggacctctcccaatgttgctcgtaatgccattgtcaactgtgctgagccggcgacctatgacctcatcaaggatgccctcctgaaagccaacctcatgacagatgacctcccttgccacttcacttctgcctttggggcaggcttctgcaccactgtcatcgcctcccctgtagacgtggtcaagacgagatacatga

SEQ ID NO: 1015 - DNA, 553 bp, Homo sapiens
  misc_feature 518: n = A,T,C or G
ctgggcaggaagattatgatcgcccgaggcccctctcctacccagataccgatgttatactgatgtgtttttccatcgacagccctgatagttcagaaaacatcccagaaaagtggaccccagaagtcaagcatttctgtcccgacgtgcccatcatcctggttgggaataagaaggatcttcggaatgatgagcacacaaggcgggagctagccaagatgaagcaggagccggtgaaacctgaagaaggcagagatatggcaaacaggattggcgcctttgggtacatggagtgctcagcaaagaccagagatggagtgagagaggtttttgaaatggctacgagagctgctctgcaagctagacgtgggaagaaaaaatctgggtgccttgtcttgtgaaaccttgctgcaagcacagcccttatgcggttaattttgaagtgctgtttattaatcttagtgtatgattactggcctttttcatttatctataatttacctaagattacaaatcangaagtcatcttgctaccagtatttagaagccaact

SEQ ID NO: 1016 - DNA, 431 bp, Homo sapiens
ccacttcacatgatggcgggcctttaagagcacaaagaagtttaatatggacaacaacaggaaaaagcaagaagaaaacaagtagggaaagacagctaacctggagagagagaatttctttaacctttatgttcttcattaaaaatcttatcttggactgatttgagggatttttagaaacatggccttattttatataagcattaccttcccaggaatctttgttgtatattaatttttgataaccatttgattaactttaaaattaagtatatgtgtgtatatatacatatgtatgtttatatacacacatgtatctgtatagttttatatatacatatatacacatagacatacagagaaccactactttgtaatagtgtacagtttgttttatatctctttactttttttgttactattttatctgt

SEQ ID NO: 1017 - DNA, 490 bp, Homo sapiens
  misc_feature 427, 434: n = A,T,C or G
ctggaagaacaaggcgaagttctggtggctgtctgcgatgaatgtgcccttggctttggctgggtatgtcacccgggtagttttgggtgcaatgctctgatccttatccacggtggaaagatcaacatttgtgatgccaacttcagtggagatcttgactctgagctctacggtatttgcaatataccggttgtcaccttcaacttcgacaaggaagtcataataaccactggaaaatttgacgttcatgaaatttagttcaaaaacatcccctacaggggtgaaggatgtcttctggaggacagtggctctggaagcaacagatttagcatgttctagtttaacagtggcctgagtcagaggctgagacagaacattggtgacttgcaaccgcaagatagcctgttcatgagtgtcggaagcaganccctcangcacaaccacaactggcacgtggtagcgattatgcgagagcacaggcagacctcgg

SEQ ID NO: 1018 - DNA, 503 bp, Homo sapiens
ggagtaagctgagtacaagtaccatagcagcagagctgcaaaaggtcttgggacctatagtcctaatgcaagataaggtcatggggcctaaggccatggggcctgaggcacccctagaccctgagccttcagcatttaagggagggtgtccccccattctcgataggccatggtacacagatgggtctagccgaggtgctataactgcttggaccactgttgcagtccaacctagtactgacactatatggtttgaaacccggtgtggacaaagtagccaatgggctgaacttagagcagtgtggatggtgatcaccaaggaggtgacactgatggtaatctgtatcaatagctgggtggtctaccaaggcttaactttgtggttaactacctggaaaatacagaagttgctagtcggccaccaacccatttggggtcaagccacgtggcaagacctctgggaaatgggtcatcagaaacaggtaaccgtttatcatgtgtca

SEQ ID NO: 1019 - DNA, 348 bp, Homo sapiens
cctgtgtatggagtagaggcgggtgcacgggtactgttcctcacggcagtcaagaggcccaggctctgtgggctccagctctgcatttcccggttctggggttggggctgggatgacttcctgttggacttgctgctgggactggaactggaactgttcctcggagggccgaggagtcacctcttgataatcatagtagtctgggttgtcgatctggtcgctatagtgggtgtactggacgtggtcagggaacggcggcagcgggtccaggtcatactggccctgagccagcaagcctgcaggcaggaatagcaggaagaggtaggcagctctcatggcaacaaagag

SEQ ID NO: 1020 - DNA, 260 bp, Homo sapiens
ccacacggcgaccgagggacagatggggccctgcgtcccataggctgcctgaaggtgggtagggcggcctgcggcatagtggggtggctgtgggctcccagcctggcccctgggaaccgtgggagcacagggacaagcacatggctatggaatgcagggtgacccaaggacaagcgagttgcggggatctctactgtgaccatgcagaattgatcgcagtctgctgcgccaccaccacctcatgttcccgaggggaacag

SEQ ID NO: 1021 - DNA, 407 bp, Homo sapiens
ccttatgactataacggcccacgagaaaaatatggaatcgttgattacatgatcgagcagtccgggcctccctccaaggagattctgaccctgaagcaggtccaggagttcctgaaggatggagacgatgtcatcatcatcggggtctttaagggggagagtgacccagcctaccagcaataccaggatgccgctaacaacctgagagaagattacaaatttcaccacactttcagcacagaaatagcaaagttcttgaaagtctcccaggggcagttggttgtaatgcagcctgagaaattccagtccaagtatgagccccggagccacatgatggacgtccagggctccacccaggactcggccatcaaggacttcgtgctgaagtacgccctgcccctggttgg

SEQ ID NO: 1022 - DNA, 140 bp, Homo sapiens
ccaccccagagtgggagaggctgggaggttgggaggctgtggagagaagtgagcaaggtgctcttgaacctgtgctcattttgcaattttatcagtaatttgacttagagtttttacgaaacctcttttgttgtccttgc

SEQ ID NO: 1023 - DNA, 280 bp, Homo sapiens
ctggaggtgcctcagaaggtgcattctgcttcctgcaggggcttgaaacaccaaggcactccagggatcctggagtcaaagcagcagccccggttgttgcactccttgggggtgacatgggggtagccgcagtccaccctgtccttggctggcacggcacactggtttgcagacaggcccgcgtactcctcagcagagctggaggacagcaaggccaggaccagccccagcatgcagagcgctctggcagccatgaccaccgtgggctccgggacgcagc

SEQ ID NO: 1024 - DNA, 274 bp, Homo sapiens
  misc_feature 262: n = A,T,C or G
cctggctgagcaggcagagcaccctgggaccccagggcagaaggacccctgccctccagtccccaagacccaggcccgtctccactcatacacgccacctacatgtgacgtcagccctgaaaaggtaacaggaaagttcagaacaaaaacaaaaccccaaaagtaaaaaggctacgtgtagcagagtaataccggaaacgttatatacacaggcggtgatggccccctcggaagtgtccgggtcacttagggggcactgcanaggtccctgtgg

SEQ ID NO: 1025 - DNA, 446 bp, Homo sapiens
  misc_feature 427, 431, 440: n = A,T,C or G
gcaaagagtgtactgtgcttgaggcagagcactcacacataaatggctgtgtgtggaattgcttgccaaagaagtttctagcctttccctttcccctaactgcatcagggaagaattcttatctctagcttggtttccacatgaggtttttctgagaagggcttgggacaagaagtctgtcatgttagttaagcaggcaagaaatcctactaatccagttttgtttgaaagttgtttgtccgtatgattttttaaaagtcaagtttaatttcaaaaaaccttttttttctgagattacttttggggtaatatttaaaatgagagacattttgtaaccctgtaaaatacatagggaatataacattccagtgtatacaaagaaggcaaattctttaatcaaataaagcgcattataaaatcaaaaaanaaanaaaaaaaanaaaaaa

SEQ ID NO: 1026 - DNA, 189 bp, Homo sapiens
ctgtgagagagatgctcaatatgccccaggctatgacaaagtcaaggacatctcagaggtggtcacccctcggttcctttgtactggaggagtgagtccctatgctgaccccaatacttgcagaggtgattctggcggccccttgatagttcacaagagaagtcgtttcattcaagttggtgtaatcag

SEQ ID NO: 1027 - DNA, 92 bp, Homo sapiens
ccagaccctccttagtacaggatctcggaccacaaaccaaggagtctcgtggccttggattcccagaccctaggatggtatccctctgacag

SEQ ID NO: 1028 - DNA, 438 bp, Homo sapiens
ctgaaaagccatctttgcattgttcctcatccgcctccttgctcgccgcagccgcctccgccgcgcgcctcctccgccgccgcggactccggcagctttatcgccagagtccctgaactctcgctttctttttaatcccctgcatcggatcaccggcgtgccccaccatgtcagacgcagccgtagacaccagctccgaaatcaccaccaaggacttaaaggagaagaaggaagttgtggaagaggcagaaaatggaagagacgcccctgctaacgggaatgctaatgaggaaaatggggagcaggaggctgacaatgaggtagacgaagaagaggaagaaggtggggaggaagaggaggaggaagaagaaggtgatggtgaggaagaggatggagatgaagatgaggaagctgagtcagctacgggcaagcgggcag

SEQ ID NO: 1029 - DNA, 330 bp, Homo sapiens
ccagccgcatgggagtggaggcagtcatcgccttgctagaggccaccccggacaccccagcttgcgtcgtgtcactgaacgggaaccacgccgtgcgcctgccgctgatggagtgcgtgcagatgactcaggatgtgcagaaggcgatggacgagaggagatttcaagatgcggttcgactccgagggaggagctttgcgggcaacctgaacacctacaagcgacttgccatcaagctgccggatgatcagatcccaaagaccaatcgcaacgtagctgtcatcaacgtgggggcacccgcggctgggatgaacgcggccgtacgctcag

SEQ ID NO: 1030 - DNA, 228 bp, Homo sapiens; identical to SEQ ID NO: 903

SEQ ID NO: 1031 - DNA, 294 bp, Homo sapiens
ccacaaagccattgtatgtagctttagctcagcgcaaagaagagcgccaggctcacctcactaaccagtatatgcagagaatggcaagtgtacgagctgtgcccaaccctgtaatcaacccctaccagccagcacctccttcaggttacttcatggcagctatcccacagactcagaaccgtgctgcatactatcctcctagccaaattgctcaactaagaccaagtccccgctggactgctcagggtgccagacctcatccattccaaaatatgcccggtgctatccgcccag

SEQ ID NO: 1032 - DNA, 278 bp, Homo sapiens
ggaggtattacagacagcactgcactttggagttgggcagctacatcgaggacctctttgtggtccacagtgacctctccagcattgtgatcctggataactccccaggggcttacaggagccatccagacaatgccatccccatcaaatcctggttcagtgaccccagcgacacagcccttctcaacctgctcccaatgctgggtgccctcaggttcaccgctgatgttcgttccgtgctgagccgaaaccttcaccaacatcggctctggtgacgg

SEQ ID NO: 1033 - DNA, 155 bp, Homo sapiens
  misc_feature 9, 17, 31, 74, 75: n = A,T,C or G
cgcgttcanccatgttnaaaccgattgcatnaacttcgaaaccggcccgcccgccggcgcctggagaggggcanngggagaagcagagagtttatcattcatctgtacacatagacgtttcttctttaaataacaccacgggcgggagccccatc

SEQ ID NO: 1034 - DNA, 401 bp, Homo sapiens
ctggaccagcaccccattgacgggtacctctcccacaccgagctggctccactgcgtgctcccctcatccccatggagcattgcaccacccgctttttcgagacctgtgacctggacaatgacaagtacatcgccctggatgagtgggccggctgcttcggcatcaagcagaaggatatcgacaaggatcttgtgatctaaatccactccttccacagtaccggattctctctttaaccctccccttcgtgtttcccccaatgtttaaaatgtttggatggtttgttgttctgcctggagacaaggtgctaacatagatttaagtgaatacattaacggtgctaaaaatgaaaattctaacccaagacatgacattcttagctgtaacttaactattaagg

SEQ ID NO: 1035 - DNA, 333 bp, Homo sapiens
ctgagctgggggttgaatttctccaggcactccctggagagaggacccagtgacttgtccaagtttacacacgacactaatctcccctggggaggaagcgggaagccagccaggttgaactgtagcgaggcccccaggccgccaggaatggaccatgcagatcactgtcagtggagggaagctgctgactgtgattaggtgctggggtcttagcgtccagcgcagcccgggggcatcctggaggctctgctccttagggcatggtagtcaccgcgaagccgggcaccgtcccacagcatctcctagaagcagccggcacaggagggaaggtgg

SEQ ID NO: 1036 - DNA, 198 bp, Homo sapiens
ccaatgtacatggtggactatgccggcctgaacgtgcagctcccgggacctcttaattactagacctcagtactgaatcaggacctcactcagaaagactaaaggaaatgtaatttatgtacaaaatgtatattcggatatgtatcgatgccttttagtttttccaatgatttttacactatattcctgccaccaagg

SEQ ID NO: 1037 - DNA, 289 bp, Homo sapiens
ctggagatgatcctcaacaagccagggctcaagtacaagcctgtctgcaaccaggtggaatgtcatccttacttcaaccagagaaaactgctggatttctgcaagtcaaaagacattgttctggttgcctatagtgctctgggatcccaccgagaagaaccatgggtggacccgaactccccggtgctcttggaggacccagtcctttgtgccttggcaaaaaagcacaagcgaaccccagccctgattgccctgcgctaccagctacagcgtggggttgtggtcctgg

SEQ ID NO: 1038 - DNA, 368 bp, Homo sapiens
ccagacgtggtggctcacacctgcaatcccagcaccttaggaggccgaggcaggaggatccttgaggtcaggagttcgagaccagcctcgccaacatggtgaaaccccatttctactaaaaatacaaaaaattagccaagtgtggtggcatatgcctgtaatcccaactactcagaaggccgaggcaggagaattacttgaacgcaggagaatcactgcagcccaggaggcagaggttgcagtgagccgagattgcaccactgcactccagcctgggtgacagagcaagactccatctcagtaaataaataaataaataaaaagcgctgcagtagctgtggcctcaccctgaagtcagcgggcccagg

SEQ ID NO: 1039 - DNA, 417 bp, Homo sapiens
  misc_feature 226, 227, 246, 259, 390, 391: n = A,T,C or G
ctgggcctatgctggtcatgaacggtcctggaaaatgactcccttccttcagtatctgcatcctcatgaagtcattcattttggagatcgtgtcttcacttttcttggtgaagaaactgctggatggagttgttggtggcatctgaggagtccgaagatggctctcagggaaggttgtgctggcctctgaaggatttggaagctgactctgttcctggggtagctnnatgctcttggggtcattgnttctcgggtttgnttttttctttatctggataaaactatgcatttctgaaatcagttttgacatctggttcttttttcctaagtcgaaagcagaaaagttggaagcttatctccttcttcacagggggatattgtggacattgnnctgtccccactacatccatttttcct

SEQ ID NO: 1040 - DNA, 409 bp, Homo sapiens
ctgtccaatggcaacaggaccctcactccattcaatgtcacaagaaatgacgcaagagcctatgtatgtggaatccagaactcagtgagtgcaaaccgcagtgacccagtcaccctggatgtcctctatgggccggacacccccatcatttcccccccagactcgtcttacctttcgggagcgaacctcaacctctcctgccactcggcctctaacccatccccgcagtattcttggcgtatcaatgggataccgcagcaacacacacaagttctctttatcgccaaaatcacgccaaataataacgggacctatgcctgttttgtctctaacttggctactggccgcaataattccatagtcaagagcatcacagtctctgcatctggaacttctcctggtctctcag

SEQ ID NO: 1041 - DNA, 492 bp, Homo sapiens
  misc_feature 473: n = A,T,C or G
cctcggctccacacctccgctgtgaccacagcctcaggtcaagctgtgctggggccatccaccttcctttgccatttagaagatggggcttggagcttggcaacacagaaattgacatcagccttataaaaccttggctgaacctaccgacctccaggagaatttcagccaaaacaaaaaagcaaatacacagagggaccctggaaccagaatccctccccatgggaaagacgaaggcacagagattcgagccaagtttcccaacatgttggtgtttgcagaaaagtccggtcacgtcacacacagcacagaggcaagaagcgaaggcagtggcattcacaggactactttatattaaagtttattacatttggaaaatctactgtacagggaaaaacccattggattaagtagagttttgccaaaagcaaaagactatcactctttggaaaatattcctgattccagcccanggcccagggtggggccaca

SEQ ID NO: 1042 - DNA, 125 bp, Homo sapiens
cctggctctgatccagtgacccctctcaccaaagaactcggtttaaccagggctctgtaagaccactcccacccagagacttgtgtggcctggtgtggcctgtgtgtcggattccttcctgtcag

SEQ ID NO: 1043 - DNA, 459 bp, Homo sapiens
ccagcctggagataagggtgaaggtggtgcccccggacttccaggtatagctggacctcgtggtagccctggtgagagaggtgaaactggccctccaggacctgctggtttccctggtgctcctggacagaatggtgaacctggtggtaagggagaaagaggggctccgggtgagaaaggtgaaggaggccctcctggagttgcaggaccccctggaggttctggacctgctggtcctcctggtccccaaggtgtcaaaggtgaacgtggcagtcctggtggacctggtgctgctggcttccctggtgctcgtggtcttcctggtcctcctggtagtaatggtaacccaggacccccaggtcccagcggttctccaggcaaggatgggcccccaggtcctgcgggtaacactggtgctcctggcagccctggagtgtctggaccaaaaggtgatgctgg

SEQ ID NO: 1044 - DNA, 368 bp, Homo sapiens
cctgggcccgctgacttcagggtgaggccacagctactgcagcgctttttatttatttatttatttactgagatggagtcttgctctgtcacccaggctggagtgcagtggtgcaatctcggctcactgcaacctctgcctcctgggctgcagtgattctcctgcgttcaagtaattctcctgcctcggccttctgagtagttgggattacaggcatatgccaccacacttggctaattttttgtatttttagtagaaatggggtttcaccatgttggcgaggctggtctcgaactcctgacctcaaggatcctcctgcctcggcctcctaaggtgctgggattgcaggtgtgagccaccacgtctgg

SEQ ID NO: 1045 - DNA, 315 bp, Homo sapiens
ccaatgggctttgctgtagcttgctgaaatcaccaagcaggagagatttaaccagaggcgatgtgtccagtcaccagcatagagccatcctctgtgtcaccatccacacgcagggcctcctggcagacctcatgcaatgccctccatgttaatattcatcagaaaatggataattaggggggccagcaaaaatatcaagggtcaaatatcgcacatttctgtttaggccatctatggctttcatctcctctgaagtcaactggaattcaaacacctgcacgttctgtctgatgcgctgctcattgtagctcttgg

SEQ ID NO: 1046 - DNA, 317 bp, Homo sapiens
cctcgcctggagggccccgggcagcacagggaggacgagcttgtccagcagagggtctggcagagggtcccgcagaggtttgggcagggggtctgacatccctggctcctgctctggctctggctgccgggatttgcacaggcccaggtgcatacagatgccgtttgagtcaatctggttctggaagtagtcgatgaccagggggaagtagtcgtcaagcacttggttgcactggggcatgagcagcttcaaggggaggacgttgcactcctgctccaggaacttcctcaccgtgtcctggaaaatggcctccttgg

SEQ ID NO: 1047 - DNA, 412 bp, Homo sapiens
  misc_feature 183, 271, 287, 292, 294, 343: n = A,T,C or G
gtacaagctttttttttttttttttttttttttgtttaatgcttgaactttattttggagagagaaatttagaaagacacaaggtacacagagtaaaatgtttttcttttttcaggaccttgaactgaatcttgcactgctttggtttctatctaggaagctcagcgacagcagagtctgtanaggcggccactgatttcacacaccccggagagggactcacgggtagcacaacggccggttcggcaatagcaggtggctcttgcctganaacctgaggttctaanagcananagtccatttcctgcaaaggagatagcaaggtcctggttgtcttccccanactgcttctgggttgtagcctcatcagctctttcctggagtgactcagcctgggcctgcagggccacca

SEQ ID NO: 1048 - DNA, 476 bp, Homo sapiens
  misc_feature 267, 336, 344, 360, 395, 419, 420, 430, 441: n = A,T,C or G
taaaaaaaggaaaaagttttattacgaaactagtttgtataaaacagggttatacatatttttgtaagtttgtaataaaacagtaagaaaaaaaggcagtaatagaaatctccaaaaggcaacctatcaaaaccaactggctgccactttgagtttggacagtagctgcataaactttgttcttcttgaacagtatttaataacatcattaatacattaacaacatttctataaagtaagacacattggtgctgaagtacaactggnggcctcttgatctcacctatgaggagagttctttacaaaaccacatagggaaaattgcagttgtaaggngaactacncatctaaaatatgcanaggtaatagcattacatgttaaaggtatcaagggnatatacacattttaaaccatttgnnacaaaacttntataaaatttntttctctctctttctctcttatgcacaaaaaatat

SEQ ID NO: 1049 - DNA, 274 bp, Homo sapiens
cctggctgagcaggcagagcaccctgggaccccagggcagaaggacccctgccctccagtccccaagacccaggcccgtctccactcatacacgccacctacatgtgacgtcagccctgaaaaggtaacaggaaagttcagaacaaaaacaaaaccccaaaagtaaaaaggctacgtgtagcagagtaataccggaaacgttatatacacaggcggtgatggccccctcggaagtgtccgggtcacttagggggcactgcagaggtccctgtgg

SEQ ID NO: 1050 - DNA, 472 bp, Homo sapiens
ctgcagcctgggactgaccgggaggctctgattatttacccaccacaggtaggttgtgttctgaatctcaggttcacaggttaaggctacagcatcctcatcctccacggggttggagttgttgctggtgatgaagggtttgggtggctctgcatagactgtgatcgtcgtgactgtggtcctattgaggccagtgtctgagttatgggcttggcacgtataggatccactattattcacagtgatgttggggataaagagctcttgggtggattgctggaaagtcccattgacaaaccaagagtactgtgcaggtgggttagaggctgcgtggcaggagaggttcagattttcccctgatctgtaagatgtgtttagaggggaaatggtgggggcatccgggccatagaggacattcaggatgactgaatcactgcgcctggcactcactgggttctgggtttcacatttg

SEQ ID NO: 1051 - DNA, 249 bp, Homo sapiens
ccaccaaccgtggcatcacgcgaatccggggcaccagctaccagagccctcacggcatccccatagacctgctggaccggctgcttatcgtctccaccaccccctacagcgagaaagacacgaagcagatcctccgcatccggtgcgaggaagaagatgtggagatgagtgaggacgcctacacggtgctgacccgcatcgggctggagacgtcactgcgctacgccatccagctcatcacagacctgc

SEQ ID NO: 1052 - DNA, 289 bp, Homo sapiens
ccaggaccacaaccccacgctgtagctggtagcgcagggcaatcagggctggggttcgcttgtgcttttttgccaaggcacaaaggactgggtcctccaagagcaccggggagttcgggtccacccatcgtttgtctcgttgagatcccagagcactataggcaaccagaacaatatctttcgacttgcagaaatctagcaatttactccggttgaaatacggatgacattctacctggttgcagacaggcttgtacttgagtcctggcttgttgaggatcatctccag

SEQ ID NO: 1053 - DNA, 199 bp, Homo sapiens
ccacgactgcatgcccgcgcccgccaggtgatacctccgccggtgacccaggggctctgcgacacaaggagtctgcatgtctaagtgctagacatgctcagctttgtggatacgcggactttgttgctgcttgcagtaaccttatgcctagcaacatgccaatctttacaagaggaaaccgtaagaaagggcccagccg

SEQ ID NO: 1054 - DNA, 224 bp, Homo sapiens
tcgaccctgtgaagcaggagacagatgctgcattttcactgttgtttgtcctctgtttttgtagcatccccgggaacttccccatcagccaggggcttgtccccaccacccttcacctggctttccagttggctgagacgctgcttcatcttcatctgggtggcgttgtactcagccaggaggcgtgcaaacctggtctgcagggcgtccagggaggaccccag

SEQ ID NO: 1055 - DNA, 390 bp, Homo sapiens
cctcttattagggctctggtagcggcggcggcggacccttggggtctggacgcaacggcggcgggagcatgaacgcccctccagccttcgagtcgttcttgctcttcgagggcgagaagaagatcaccattaacaaggacaccaaggtacccaatgcctgtttattcaccatcaacaaagaagaccacacactgggaaacatcattaaatcacaactcctaaaagacccgcaagtgctatttgctggctacaaagtcccccaccccttggagcacaagatcatcatccgagtgcagaccacgccggactacagcccccaggaagcctttgccaacgccatcaccgacctcatcagtgagctgtccctgctggaggagcgctttcgggtgg

SEQ ID NO: 1056 - DNA, 450 bp, Homo sapiens
  misc_feature 21, 22, 230, 232, 377, 391: n = A,T,C or G
ccagcatcaccttttggtccnnacactccagggctgccaggagcaccagtgttacccgcaggacctgggggcccatccttgcctggagaaccgctgggacctgggggtcctgggttaccattactaccaggaggaccaggaagaccacgagcaccagggaagccagcagcaccaggtccaccaggactgccacgttcacctttgacaccttggggaccaggaggaccagnangtccagaacctccagggggtcctgcaactccaggagggcctccttcacctttctcacccggagcccctctttctcctttaccaccaggttcaccattctgtccaggagcaccagggaaaccagcaggtcctggagggccagtttnacctctctcaccanggctaccacgaggtccagctatacctggaagtccgggggcaccaccttcacccttacct

SEQ ID NO: 1057 - DNA, 337 bp, Homo sapiens
tgagcggccgcccggcaggtcctcgcctggagggccccgggcagcacagggaggacgagcttgtccagcagagggtctggcagagggtcccgcagaggtttgggcagggggtctgacatccctggctcctgctctggctctggctgccgggatttgcacaggcccaggtgcatacagatgccgtttgagtcaatctggttctggaagtagtcgatgaccagggggaagtagtcgtcaagcacttggttgcactggggcatgagcagcttcaaggggaggacgttgcactcctgctccaggaacttcctcatcgtgtcctggaaaatggcctccttgg

SEQ ID NO: 1058 - DNA, 237 bp, Homo sapiens
ctggggactgggaatgctagcatatggtatctcaagttggctctcagaactaaacggggataagggcctagaatggaagagggaaccagccagaccctcagtccttcctgtcctggactgggagccacagatgtccctgtgatctgtcactgccctgatctgggtcttcagccattaaagctcagtgtcatcttcagtcaccaacgggggtcttggtgtccttccaaacccctttgg

SEQ ID NO: 1059 - DNA, 210 bp, Homo sapiens
  misc_feature 169, 170: n = A,T,C or G
agcccatccccccggctccctcctagtctgccctgcgtcctctgtccccgggtttcagagacaacttcccaaagcacaaagcagtttttccccctaggggtgggaggaagcaaaagactctgtacctactttgtatgtgtataataatttgagatgtttttaattattnngattgctggaataaagcatgtggaaatgacccaaaaaaaa

SEQ ID NO: 1060 - DNA, 564 bp, Homo sapiens
ctggccacagagcccagcaagtccttcctgggagagaagagttagggctgatactgaaggtctctttcacatctgggcacacgtctgccttcaggctgtaagaatttcatttgtcgattgttaaataaaaccaggagaaagcaatgcaggtctctgggaatctcatcccttccataaggaaaatgctctgccaattcaagtttcattcagtcaggaagacagaaggatttaaggcttcggtgacaattataatcctctgagaaattatttccccttaaagtcaagataagataatagtgtttactgtactttctcttgactcttgaaatccctggtattgggtgtaggcaacttgcacctgcaatgaagtccgcaggagaggaaggtctctcctcccccgaaagctatcccaggtcacatgcgtggcgaatgcccactgaacctcggctctcatggaagcaggaaagacaccgagattcaagccttctagtaggttgaggacgctgtgctcatggcatcttcggagattttggtactggcaggggtggatgcttgcaaaatact

SEQ ID NO: 1061 - DNA, 267 bp, Homo sapiens
cctatggaggtgcctatgatgtcatgagctctaagcacctttgtggtgataccaactatgcctggcccaccgcagagattgcggtcatgggagcaaagggcgctgtggagatcatcttcaaagggcatgagaatgtggaagctgctcaggcagagtacatcgagaagtttgccaaccctttccctgcagcagtgcgagggtttgtggatgacatcatccaaccttcttccacacgtgcccgaatctgctgtgacctggatgtcttgg

SEQ ID NO: 1062 - DNA, 603 bp, Homo sapiens
  misc_feature 533, 592: n = A,T,C or G
ctggtcatcttgtcatgtgaagaccatcttcctacagagtctaggctggccgtcgttgaagtcctcaccagtactacaccacttttcctcaccaacccccatcctattcttgagttgcaggatacacttgctctctggaagtgtgtccttacccttctgcagagtgaggagcaagctgttagagatgcagccacggaaaccgtgacaactgccatgtcacaagaaaatacctgccagtcaacagagtttgccttctgccaggtggatgcctccatcgctctggccctggccctggccgtcctgtgtgatctgctccagcagtgggaccagttggcccctggactgcccatcctgctgggatggctgttgggagagagtgatgacctcgtggcctgtgtggagagcatgcatcaggtggaagaagactacctgtttgaaaaagcagaagtcaacttttgggccgagaccctgatctttgtgaaatacctctgcaagcacctcttctgtctcctctcaaaagtccggctggcgtnccccaagccctgagatgctctgtcaccttcaaaggatggtgtcagagcagtgccacctnctgtctcagtt

SEQ ID NO: 1063 - DNA, 222 bp, Homo sapiens
ccatcgtggatcactgagatgcagtggcggtccccgtagctggcccgtggcatgccaccctggaagatggtgaagggcaacccctgcctagtggtcagccggaggattctggtaatcgctttgcaaggaaagggaccgtaaggcacgaggctgcggaggggctctggttgctgggcttcgctggacacgggccactggcagtagctgccgtcagagtgacag

SEQ ID NO: 1064 - DNA, 72 bp, Homo sapiens
  misc_feature 13, 14: n = A,T,C or G
gatgatcaatatnnactggaacacatgcatgcttttggaatgtataattacctgcactgtgattcatggtat

SEQ ID NO: 1065 - DNA, 251 bp, Homo sapiens
gtggccgtgatggatagcgacaccacaggcaagctgggctttgaggaattcaagtacttgtggaacaacatcaaaaggtggcaggccatatacaaacagttcgacactgaccgatcagggaccatttgcagtagtgaactcccaggtgcctttgaggcagcagggttccacctgaatgagcatctctataacatgatcatccgacgctactcagatgaaagtgggaacatggattttgacaacttcatcag

SEQ ID NO: 1066 - DNA, 289 bp, Homo sapiens
ctggagatgatcctcaacaagccagggctcaagtacaagcctgtctgcaaccaggtggaatgtcatccttacttcaaccagagaaaactgctggatttctgcaagtcaaaagacattgttctggttgcctatagtgctctgggatcccaccgagaagaaccatgggtggacccgaactccccagtgctcttggaggacccagtcctttgtgccttggcaaaaaagcacaagcgaaccccagccctgattgccctgcgctaccagctacagcgtggggttgtggtcctgg

SEQ ID NO: 1067 - DNA, 301 bp, Homo sapiens
ctgtagttgactgaagtcgctaaacaggacggatttaagtagaggtgatatgtccagtcaccggcatagagacgtcctctgcgtcaccatccacacacagggcttctggtagacatcaggcaaagctctccatgttaatattcatctgaatatggataattagggtggctagcaaaactatcactgttaaaatagtggagatttctgtctaggccatctatggctttcatgtcctccgcagtcaactggaactcaaaaacctgcacgttctgtctgatgcgctgctcattgtagctcttgg

SEQ ID NO: 1068 - DNA, 255 bp, Homo sapiens
ccagcagttcctctttgccttatatttgtggtacgcccggccagccttcaagatgggtttgtcaattcggccacctccagccaccacaccaaccacagctctgttggctgaggagataaccttcttggagccggagggcagcttcacacgggtcttcttggtctcagggttgtgggagataacggtggcatagttccctgatgcccgggccagcttgccacggtctccaggcttctcctccaggcagcacacgat

SEQ ID NO: 1069 - DNA, 77 bp, Homo sapiens
ctggacaggctccagcaccggcccaaacacgcccagacctcggcaggcaccacctggttctcccacccagaaagttc

SEQ ID NO: 1070 - DNA, 163 bp, Homo sapiens
  misc_feature 12, 108, 109, 137, 147, 148: n = A,T,C or G
ctgctgggatgnctgccaagtttttcagccataaggtagcgaaatctagcagaatccagattacatccacttccaatcacgcggtgtttgggtaatccacctagtttnnaggtaacatacgtaagaatgtccactgngttggaaacnncaattatgatgcaat

SEQ ID NO: 1071 - DNA, 246 bp, Homo sapiens
  misc_feature 14: n = A,T,C or G
ctgaccggaccggncatgcccgtccggaacgtctataagaaggagaaagctcgagtcatcactgaggaagagaagaatttcaaagccttcgctagtctccgtatggcccgtgccaacgcccggctcttcggcatacgggcaaaaagagccaaggaagccgcagaacaggatgttgaaaagaaaaaataaagccctcctggggacttggaatcagtcggcagacaaaaaaaaaaaaaaaaaaacaaa

SEQ ID NO: 1072 - DNA, 224 bp, Homo sapiens
  misc_feature 143: n = A,T,C or G
ctgccctgacagagcgctccttgatgggcatggactggaaaggatcccaggaatacaagaaggcagaaaaaaaagtttggaagatctttaaatctgacagtgaagtggctggttacatccggcaagcgggtgacttccatcangtaattattcgaggtggaggacatattttaccctatgaccagcctctgagagcttttgacatgattaatcgattcatttat

SEQ ID NO: 1073 - DNA, 301 bp, Homo sapiens
ctgtagttgactgaagtcgctaaacaggacggatttaagtagaggtgatatgtccagtcaccggcatagagacgtcctctgcgtcaccatccacacacagggcttctggtagacatcaggcaaagctctccatgttaatattcatctgaatatggataattagggtggctagcaaaactatcactgttaaaatagtggagatttctgtctaggccatctatggctttcatgtcctctgcagtcaactggaactcaaaaacctgcacgttctgtctgatgcgctgctcattgtagctcttgg

SEQ ID NO: 1074 - DNA, 132 bp, Homo sapiens
  misc_feature 41, 47, 56, 69, 78, 93: n = A,T,C or G
caagctttttttttttttttttttttttttttcgctcaaanactttnttttattantacatgggctggnattgatggnaagggacaaatgtanttggcaaccatggttagcatcggatgcccatcccaatgg

SEQ ID NO: 1075 - DNA, 301 bp, Homo sapiens; identical to SEQ ID NO: 1073

SEQ ID NO: 1076 - DNA, 436 bp, Homo sapiens
ctgctgggatgaatgccaagtttttcagccataaggtagcgaaatctagcagaatccagattacatccacttccaatcacgcggtgtttgggtaatccacctagtttccaggtaacatacgtaagaatgtccactgggttggaaaccacaattatgatgcaatcaggactgtacttgacgatctgaggaataatgaatttgaagacattaacatttctctgcaccagattgagccgactctccccttcttgctgacggactcctgcagttactactacaatcttagaattggcggtcacagaataatctttatctgccacaattttaggtgtctgaagaaataagctcccatgctgcagatccatcatttctcctttaagcttatcttccaaaacatccacaagagcaagttcatcagccagagactttcccagaa

SEQ ID NO: 1077 - DNA, 256 bp, Homo sapiens
ctgaagattaataggaaacagtgaaaaagcaacgtcctgtgatcagtaactttaaagacaagcttggttctctctttctggcactactgacattcccaccattctagcttccgaattctggaaaaagagaagatgattaacaaaaatagagaatgtagaaacttctggttttgtgcctacaggattggcaccagaccctcagtgctcacttgctccatctacaaggcagcacccctcccagaggcagccagggagg

SEQ ID NO: 1078 - DNA, 202 bp, Homo sapiens
  misc_feature 8, 10, 26, 67, 71, 77, 84, 93, 127, 133, 144: n = A,T,C or G
ctgtgctncncaaccagatccatgtnaagtgccccgcccagagaagggagccagggggagctgactncagncaacanccagtgnccggatgancaccaacatgtgaggggtgaaccttggcctccangacatntgcaccccctncccacctccacggacctcggacctccaggcggctcagtgctgcctgcggcccagctaa

SEQ ID NO: 1079 - DNA, 170 bp, Homo sapiens
gcgcttctcgggcaccgtcaggcttaagtccactccccgccctaagttctctgtgtgtgtcctgggggaccagcagcactgtgacgaggctaaggccgtggatatcccccacatggacatcgaggcgctgaaaaaactcaacaagaataaaaaactggtcaagaagctgg

SEQ ID NO: 1080 - DNA, 494 bp, Homo sapiens
cctgcggcaaagagatgcgcttattgagaaacatggcttagttataatccccgatggcactcccaatggtgatgtcagtcatgaaccagtggctggagccatcactgttgtgtctcaggaagctgctcaggtcttggagtcagcaggagaagggccattagatgtaaggctacgaaaacttgctggagagaaggaagaactactgtcacagattagaaaactgaagcttcagttagaggaggaacgacagaaatgctccaggaatgatggcacagtgggtgacctggcaggactgcagaatggctcagacttgcagttcatcgaaatgcagagagatgccaatagacaaattagcgaatacaaatttaagctttcaaaagcagaacaggatataactaccttggagcaaagtattagccggcttgagggacaggttctgagatataaaactgctgctgagaatgctgaggaaagttgaagatgaattgaaagca

SEQ ID NO: 1081 - DNA, 123 bp, Homo sapiens
ctgctgctattaagttgcaagctctacagctagctacatgactgatggatcagtttgagatttgttcccttgtcaaaagtttaactctgatagaaggttggcctcacattctgatgtttggac

SEQ ID NO: 1082 - DNA, 297 bp, Homo sapiens; identical to SEQ ID NO: 389

SEQ ID NO: 1083 - DNA, 452 bp, Homo sapiens
ctgggccacgaggacaccaccagcttggatcggcctcgccgtgtggaatactttgtagataagcaactccaagtaaaggctgtcacctgtgggccgtggaacacctacgtgtatgctgtggagaaagggaagagctgacatgtgtacgtatatgtatatgcaacacctgtgagacccccattcaggtcaaggaaaaccattgcctgcaccccaagggccccatatttgcccctccccatcacagtcctgcccttcaccctcaagcacggtcctaaacttgtctgcactttagaaacacctggagagcattgaaaactctgctgcctaaggtcagcatcaatcaaaacaatgaaatcaatgaaacaatgaaaccagagcttctaggtgtgtggcctggatagtggtagattcaaagctccacccacctcatcccaggtacatttgatgtgcag

SEQ ID NO: 1084 - DNA, 301 bp, Homo sapiens
ctgtagttgactgaagtcgctaaacaggacggatttaagtagaggtgatatgtccagtcaccggcatagagacgtcctctgcgtcaccatccacacacagggcttctggtagacatcgggcaaagctctccatgttaatattcatctgaatatggataattagggtggctagcaaaactatcactgttaaaatagtggagatttctgtctaggccatctatggctttcatgtcctctgcagtcaactggaactcaaaaacctgcacgttctgtctgatgcgctgctcattgtagctcttgg

SEQ ID NO: 1085 - DNA, 369 bp, Homo sapiens
ctgtttcccatgggccaccaggcggctcaggacagcaaacgtctcatcccctctcaggatgtacttctccatgtcctgctcgatccactggtacatgaggcccttcacatgcacgtctcggatggcgtccgtcacgtccttgtagagatgtgcttggtcaaactccaggctgtggcccagaaagtagtccaccacacaggacagcagagccatctccggtagcgagaagatgtccatgaactgcttaatggagggacccttgccatagaagccactcatctggtatagtgggatgtgctgggtacccccatacagctcaatcacctcctcgtctggcacaggctggaggcccctgtaggctgtccccag

SEQ ID NO: 1086 - DNA, 316 bp, Homo sapiens
cctcagaggtttctccacagtcctcttctgggcaaattcttgtttcttcacatgccggactagcttaagaccaatgcagtagcttatttccaagccttgcaaagtatataatatctaagaggaaaggttttgtcatcccagcgttgtccactttgtggggctttgtaggtagacggagccacactacaggcagggtatgagcagagggatgtatggagtgtgggtgactctgagcctcactgccgctgcaaggtggggaaactgtaagtgaacccctgtgggtgcgggggagggtatccggtgcgcagggaggtgg

SEQ ID NO: 1087 - DNA, 329 bp, Homo sapiens
cctgcaggggatgggaccttccagaagtgggcgtctgtggtggtgccttctggacaggagcagagatacacctgccatgtgcagcatgagggtctgcccaagcccctcaccctgagatgggagccgtcttcccagcccaccatccccatcgtgggcatcattgctggcctggttctctttggagctgtgatcgctggagctgtggtcgctgctgtgatgtggaggaggaagagctcagatagaaaaggagggagctactctcaggctgcaagcagtgacagtgcccagggctctgatatgtctcccacagcttgtaaagtgtgagacag

SEQ ID NO: 1088 - DNA, 342 bp, Homo sapiens
ccactcactgctgggacccaggcacctcccttctccatcctctctggattgtcagtaatgtcctggaacagaagcctgtgggatggccttgggcacggagaagccctggggtcagtgtcgtgcacggatggcggcagtgttgaacccaggaggctgaacccggcccaccacggaagatgagtgcatggcaaccgcctgccttcacgtcgctccacttggtaaccccaaggtctgggctgttctaggtattgcttcacgtgccccagcaagcccttaacaagagggcctggttccctgaagaaccaatcccaggaaggggccttgatccctccgccttgctga

SEQ ID NO: 1089 - DNA, 51 bp, Homo sapiens
  misc_feature 18: n = A,T,C or G
ccttgtgttcagtctccncgctcttcttgccactgttgagggtggagatgt

SEQ ID NO: 1090 - DNA, 515 bp, Homo sapiens
cctggggaggccctaggggagcaccgtgatggagaggacagagcaggggctccagcaccttctttctggactggcgttcacctccctgctcagtgcttgggctccacgggcaggggtcagagcactccctaatttatgtgctatataaatacgtcagatgtacatagagatctattttttctaaaacattcccctccccactcctctcccacagagtgctggactgttccaggccctccagtgggctgatgctgggacccttaggatggggctcccagctcctttctcctgtgaatggaggcagagacctccaataaagtgccttctgggctttttctaacctttgtcttagctacctgtgtactgaaatttgggcctttggatcgaatatggtcaagaggttggaggggaggaaaatgaaggtctaccaggctgagggtgagggcaaaggctgacgaagagggaaagttacagatttcctgtagcaggtgtgggcttacagacacatggactgg

SEQ ID NO: 1091 - DNA, 277 bp, Homo sapiens
gcgtcccggagcccacggtggtcatggctgccagagcgctctgcatgctggggctggtcctggccttgctgtcctccagctctgctgaggagtacgtgggcctgtctgcaaaccagtgtgccgtgccagccaaggacagggtggactgcggctacccccatgtcacccccaaggagtgcaacaaccggggctgctgctttgactccaggatccctggagtgccttggtgtttcaagcccctgcaggaagcagaatgcaccttctgaggcacctccag

SEQ ID NO: 1092 - DNA, 368 bp, Homo sapiens; identical to SEQ ID NO: 1044

SEQ ID NO: 1093 - DNA, 459 bp, Homo sapiens
ctgtgcatggagccatttggatggcggcgggcggggggggattctctgtatcaggagtgactttgttgccccacacagcctcctgctgcaggtgctttggaaagagatgctgccttggagctggtgaatctgtggaccacattcaagggtgtggcacaggcatcttcccatccttttcactccgaatcgctggcgacacattctcctttccagctaggaaagggttcctcgcggctggtttagattgtggttgtttgttttgcttctactaagactgttttgtttcaaaaaggaaacaagttttgtgtttgctgtctacgctggagtcctgaactgtgggtagaaaacacgacctggctttgtagaaaggacacagggctgttttatgaactaagcggtgaggctcaggtggcggctctcacagagcccctgatgctgttgttctttgagggcttaagg

SEQ ID NO: 1094 - DNA, 610 bp, Homo sapiens
  misc_feature 590: n = A,T,C or G
ccatgcaaaaggaggtggtgcactcagtgcagtcgctgccacaaaaagtccgattattttcattggtacaggggaacatatagatgactttgaacctttcaaaacacagccttttattagcaaacttcttggtatgggcgacattgaaggactgatagataaagtcaacgagttgaagttggatgacaatgaagcacttatagagaagttgaaacatggtcagtttacgttgcgagacatgtatgagcaatttcaaaatatcatgaaaatgggccccttcagtcagatcttggggatgatccctggttttgggacagattttatgagcaaaggaaatgaacaggagtcaatggcaaggctaaagaaattaatgacaataatggatagtatgaatgatcaagaactagacagtacggatggtgccaaagtttttagtaaacaaccaggaagaatccaaagagtagcaagaggatcgggtgtatcaacaagagatgttcgagaacttttgacacaatataccaagtttgcacagatggtaaaaaagatgggaggtatcaaaggacttttcaaaggtgggcgacatgtctaanaatgtgagccagtcacagat

SEQ ID NO: 1095 - DNA, 232 bp, Homo sapiens
ccttatttctcttgtcctttcgtacagggaggaatttgaagtagatagaaaccgacctggattactccggtctgaactcagatcacgtaggactttaatcgttgaacaaacgaacctttaatagcggctgcaccatcgggatgtcctgatccaacatcgaggtcgtaaaccctattgttgatatggactctagaataggattgcgctgttatccctagggtaacttgttccg

SEQ ID NO: 1096 - DNA, 377 bp, Homo sapiens
ccacgctcatggaaaccacccaaggacagccagagtccacattccctggcaagctgggtgtattcttccaaaagtttcccacccagtggttcagacaggtgtagcgtctctgcagggtcccgtgcaatgaagtcaaatgcctcaggcaggaaagccaggcaggcacccagtctggcagcctctcgaaccagcccagcacatgttttaaagttctgttgcttgtctggcgtcgatgttacctggcacacagccaccaggggcagttcgcaggaggaagaggagatagccatggctctgggcctgggctgagcacaaagtactgagagttgaggtatccggagtccaggacacagaagggacaggaatctgtgaggagg

SEQ ID NO: 1097 - DNA, 311 bp, Homo sapiens
ccacgccatggggctggagcactcccaagaccctggggccctgatggcacccatttacacctacaccaagaacttccgtctgtcccaggatgacatcaagggcattcaggagctctatggggcctctcctgacattgaccttggcaccggccccacccccacactgggccctgtcactcctgagatctgcaaacaggacattgtatttgatggcatcgctcagatccgtggtgagatcttcttcttcaaggaccggttcatttggcggactgtgacgccacgtgacaagcccatggggcccctgctggtgg

SEQ ID NO: 1098 - DNA, 404 bp, Homo sapiens
ccacccacgcttaggttcccatcacactgatgactccgggtttggcgagcacaggagcgcaaaccttttcacattctttctgtgatccaaatttgttttcgtttccaccacaacctccataccagaatcttgcacagcttttggtgtttggatcatagtaccattttaatatgaaatccctgcaagttccttcgtctttcggcaacttgcatatatctgtttcagtgagagccaatggttctgtgctcaccattagattgatggttgaactagaagctgaccttgctggctgtggaggtgggggctgagatttctttgtactgaaacttccgtggtaggtggctctgacctgagacctcaggtagcagaccacagccacatggtatgtctgcccagcgagcagg

SEQ ID NO: 1099 - DNA, 442 bp, Homo sapiens
ccatgggatggctcttctgaccattgggggccaggccaggccaggccaggcttagggtagcaaggaccaggccaaaggggcagggcctcctttggaggggttgaggggtacatcctcggctggtgtttgcatccaggggtccagcaggatctcttccagtgagggtcgggaagaaggtttgggggccaggcaccggcggattagggcacagcagtctggggagacatgggctgggaagtggagctcagcttccagaatctcctggtccctctcaaagggaatgtccccacacaccatgtcatagaggaggatgcccagtgaccagacagtggccgggagtgcatggtactggtgtcgagagatccactctggggggctgtacacccttgtcccatcaaagtcagtgtagggttcatcatgaagcagggcaccaggaaccaaa

SEQ ID NO: 1100 - DNA, 191 bp, Homo sapiens
ccacgaaaatcaatgagaagccacaggtgatcgcggactatgagagcggacgggccatacccaataaccaggtgcttggcaaaatcgagcgggccattggcctcaagctccggggaaaggacattggaaagcccatcgagaaggggcctagggcgaaatgaacacaaagcctcgaaatcagtgcgctccag

SEQ ID NO: 1101 - DNA, 178 bp, Homo sapiens
cgggtactttggtggacatgaaggaactgggcatatgggagccattggctgtgaagctgcagacttataagacagcagtggagacggcagttctgctactgcgaattgatgacatcgtttcaggccacaaaaagaaaggcgatgaccagagccggcaaggcggggctcctgatgctgg

SEQ ID NO: 1102 - DNA, 209 bp, Homo sapiens
agccaggctagtgacagaaatggattcgaaatatcagtgtgtgaagctgaatgatggtcacttcatgcctgtcctgggatttggcacctatgcgcctgcagaggttcctaaaagtaaagctttagaggccaccaaattggcaattgaagctggcttccgccatattgattctgctcatttatacaataatgaggagcaggttggactgg

SEQ ID NO: 1103 - DNA, 396 bp, Homo sapiens
  misc_feature 351: n = A,T,C or G
ctatagggctcgagggccgcccgggcaggtggtgcctctaatactggtgatgctagaggtgatgtttttggtaaacaggcggggtaagatttgccgagttccttttactttttttaacctttccttatgagcatgcctgtgttgggttgacagtgggggtaataatgacttgttggttgattgtagatattgggctgttaattgtcagttcagcgttttaatctgacgcaggcttatgcagaggagaatgttttcatgttacttatactaacattagttcttctatagggtgatagattggtccaattgggtgtgaggagttcagttatatgtttgggattttttaggtantgggtgttgagcttgaacgctttcttaattggtggctgctttagg

SEQ ID NO: 1104 - DNA, 342 bp, Homo sapiens
  misc_feature 224, 226, 302: n = A,T,C or G
ctgctgatacccaggcagtagctgatgctgtcacctaccagctcggtttccacagcattgaactgaatgagcctccactggtccacacagcagccagcctctttaaggagatgtgttaccgataccgggaagacctgatggcgggaatcatcatcgcaggctgggaccctcaagaaggagggcaggtgtactcagtgcctatggggggtatgatggtaaggcantnctttgccattggaggctccgggagctcctacatctatggctatgttgatgctacctaccgggaaggcatgaccaangaagagtgtctgcaattcactgccaatgctctcgctttgg

SEQ ID NO: 1105 - DNA, 551 bp, Homo sapiens
ctggggccactgtcggcatcatgattggagtgctggttggggttgctctgatatagcagccctggtgtagtttcttcatttcaggaagactgacagttgttttgcttcttccttaaagcatttgcaacagctacagtctaaaattgcttctttaccaaggatatttacggaaaagactctgaccagagatcgagaccatcctagccaacatcgtgaaaccccatctctactaaaaatacagaaattagctggacatggtggcatgtgcctgtaatcccagctactcaggaggctgaggcaggagaactgcttgaacagggacccgggaggcggagattggagtgagccgagatcgcgccactgcactccagtctgggctacacagtgagactctgtctcaagaaaaataaacagaagaattgggggttgggggtgggaaacagtgtttccaggcagagagaacagcacgtacaaaggagactgttgggagggttaaatgaaataattcatgtaaggtacttagtaccacacatgaatttcacaagcagcag

SEQ ID NO: 1106 - DNA, 280 bp, Homo sapiens
ctgctcttcacacagggttctggggaaaacaaggaagagatcatcaattatgaatttgacaccaaggacctggtgtgcctgggcctgagcagcatcgttggcgtctggtacctgctgaggaagcactggattgccaacaacctttttggcctggccttctcccttaatggagtagggctcctgcacctcaacaatgtcagcactggctgcatcctgctgggcggactcttcatctacgatgtcttctgggtatttggcaccaatgtgatggtgacagtgg

SEQ ID NO: 1107 - DNA, 570 bp, Homo sapiens
ctgattagtgtctaaggaatggtccaatactgttgcccttttccttgactattacactgcctggaggatagcagagaagcctgtctgtacttcattcaaaaagccaaaatagagagtatacagtcctagagaattcctctatttgttcagatctcatagatgacccccaggtattgtcttttgacatccagcagtccaaggtattgagacatattactggaagtaagaaatattactataattgagaactacagcttttaagattgtacttttatcttaaaagggtggtagttttccctaaaatacttattatgtaagggtcattagacaaatgtcttgaagtagacatggaatttatgaatggttctttatcatttctcttccccctttttggcatcctggcttgcctccagttttaggtcctttagtttgcttctgtaagcaacgggaacacctgctgagggggctctttccctcatgtatacttcaagtaagatcaagaatcttttgtgaaattatagaaatttactatgtaaatgcttgatggaattttttcctgctagtgtagct

SEQ ID NO: 1108 - DNA, 386 bp, Homo sapiens
ctgttcctgcggtgacactgtataaacacgatgaccctgccttgactttagttgctggtcttacatcaaataagcccacagacaaactccgtgccctgcctctgtggttatctttacaatacttgggacttgatgggtttgtggagaggatcaagcatgcctgtcaactgagtcaacggttgcaggaaagtttgaagaaagtgaattacatcaaaatcttggtggaagatgagctcagctccccagtggtggtgttcagatttttccaggaattaccaggctcagatccggtgtttaaagccgtcccagtgcccaacatgacaccttcaggagtcggccgggagaggcactcgtgtgacgcgctgaatcgctggctgggagaacag

SEQ ID NO: 1109 - DNA, 409 bp, Homo sapiens
ctctggtctgtaaccagtctcttcaaggcattatctcctggggccaggatccgtgtgcgatcacccgaaagcctggtgtctacacgaaagtctgcaaatatgtggactggatccaggagacgatgaagaacaattagactggacccacccaccacagcccatcaccctccatttccacttggtgtttggttcctgttcactctgttaataagaaaccctaagccaagaccctctacgaacattctttgggcctcctggactacaggagatgctgtcacttaataatcaacctggggttcgaaatcagtgagacctggattcaaattctgccttgaaatattgtgactctgggaatgacaacacctggtttgttctctgttgtatccccagccccaaagacagctcctgg

SEQ ID NO: 1110 - DNA, 215 bp, Homo sapiens; identical to SEQ ID NO: 890

SEQ ID NO: 1111 - DNA, 308 bp, Homo sapiens
cctgggcccgctgacttcagggtgaggccacagctactgcagcgctttttatttatttatttatttactgagatggagtcttgctctgtcacccaggctggagtgcagtggtgcaatctcggctcactgcaacctctgcctcctgggctgcagtgattctcctgcgttcaagtaattctcctgcctcggccttctgagtagttgggattacaggcatatgccaccacacttggctaattttttgtatttttagtagaaatggggtttcaccatgttggcgaggctggtctcgaactcctgacctcaag

SEQ ID NO: 1112 - DNA, 177 bp, Homo sapiens
ccactggctccctgggccagggcctcggggccgcttgtgggatggcctacaccggcaaatacttcgacaaggccagctaccgagtctattgcttgctgggagacggggagctgtcagagggctctgtatgggaggccatggccttcgccagcatctataagctggacaaccttgtgg

SEQ ID NO: 1113 - DNA, 646 bp, Homo sapiens
  misc_feature 529, 580, 622: n = A,T,C or G
ccccaccatggacacactttgctacacactcctgctgctgaccaccccttcctgggtcttgtcccaggtcaccttgaaggagtctggtcctgtactggtgaaacccacagagaccctcacgctgacctgcaccgtctctgggttttcactcagtaatattagagtgggtgtgagttggatccgtcagcccccagggaaggccctggagtggtttgcatacattttttcgactgacgaaaaatccttcaattcatctctgaagaacaggctcaccatctccaaggacacctctaaaagccaggtggtccttagcatgaccaacatggaccctgtggacacagccacatattactgtgcacggctctctatttacttcggggagttagaaacctaccaatacatggacgtctggggcaaagggaccaccgccaccgtctcctcagcatccccgaccagccccaaggtcttcccgctgagcctctgcagcacccagccagatgggaacgtggtcatcgcctgcctggtccanggcttcttcccccaggagccactcagtgtgacctggagcgaaagcggacanggcgtgaccgccagaaacttccccacccagccaggatgcctncggggacctgtacaccacgagcag

SEQ ID NO: 1114 - DNA, 420 bp, Homo sapiens
tgttgttttactcacctaacccttagaaaatgaatgttagaaggtgcctgccgaggcgggacagagtgttcgctcgcgctggagaaggctctgctcagccctgagagtcccttcctgccccaccgatactggcactttaaaaaggaagctgaccgcacagtgtccagacgaattggcccccagaagatggggagttctgtcctgcccttctgtgtctgcgtgacctcacccagcctaggagggaggtgcattcagggtagatttgcctctcattcaaagttctggggctttgggtggaaaacagccagctttggcgctgttggggagactcctccagaccaggaaccccagaaggagacagagcctgccacatcctcccacgccaggccctgggccagggtgattggactgagaatttgg

SEQ ID NO: 1115 - DNA, 416 bp, Homo sapiens
ctgaaagtttctaaaatagaaacctggtgcatatggccccaaaacaccacatgctttgattacactcagggagcatgagttgcctatttgggtgagaaaatcccatgttacagtgcgatcgctgggcacgttttggagtaattccagccactgctatgtaagtgtttttaattcaggggtgtcttctacgttttcatcttctgaatatcttgtgacggtgcaggtttgagcaaaactggcatgaaatgagagctgttttagatgaagattgcaagatggatggcttggcccacagtggcagtgggttgggggtggaatgtggacaattaggaaaaaggcatgtcattctatctggctcctggagaggcagatagtcctgggggctttggtgtcacagttcccaaaagcaaggttgg

SEQ ID NO: 1116 - DNA, 382 bp, Homo sapiens
ccttatttctcttgtcctttcgtacagggaggaatttgaagtagatagaaaccgacctggattactccggtctgaactcagatcacgtaggactttaatcgttgaacaaacgaacctttaatagcggctgcaccatcgggatgtcctgatccaacatcgaggtcgtaaaccctattgttgatatggactctagaataggattgcgctgttatccctagggtaacttgttccgttggtcaagttattggatcaattgagtatagtagttcgctttgactggtgaagtcttagcatgtactgctcggaggttgggttctgctccgaggtcgccccaaccgaaaatttttaatgcaggcttggtagtttaggacctgtgggtttg

SEQ ID NO: 1117 - DNA, 370 bp, Homo sapiens
ctgcgtgtctgaaaaccaaagatttaaaacatagtaattattgaacctcagaagaaaaactcagattgaaagagcttagaataagaccctttttgagttgagaaaggtgagtacttagatttttcatttgctttgtttgggattacttacatcagtattttatgttgatcagaaagaaaggattcaattagctattgttcggttaataaaaatgtcagccactgtaggagtaagttggatgtccagcctttttagattgcttaacttggaaacactggactgggagcggtggctcatgcctgtgatcccagcactctgggaggccaaggcaggcagatcactggaggtcaggagtttgagaccaacctgg

SEQ ID NO: 1118 - DNA, 494 bp, Homo sapiens
ctgtctcttacttttaaccagtgaaattgacctgcccgtgaagaggcgggcataacacagcaagacgagaagaccctatggagctttaatttattaatgcaaacagtacctgacaaacccacaggtcctaaactaccagacctgcattaaaaatttcggttggggcgacctcggagcagaacccaacctccgagcagtacatgctaagacttcaccagtcaaagcgaactactatactcaattgatccaataacttgaccaacggaacaagttaccctagggataacagcgcaatcctattctagagtccatatcaacaatagggtttacgacctcgatgttggatcaggacatcccgatggtgcagccgctattaaaggttcgtttgttcaacgattaaagtcctacgtgatctgagttcagaccggagtaatccaggtcggtttctatctacttcaaattcctccctgtacgaaaggacaagagaaataagg

SEQ ID NO: 1119 - DNA, 407 bp, Homo sapiens
ccttatgactacaacggcccacgagaaaaatatggaatcgttgattacatgatcgagcagtccgggcctccctccaaggagattctgaccctgaagcaggtccaggagttcctgaaggatggagacgatgtcatcatcatcggggtctttaagggggagagtgacccagcctaccagcaataccaggatgccgctaacaacctgagagaagattacaaatttcaccacactttcagcacagaaatagcaaagttcttgaaagtctcccaggggcagtcggttgtaatgcagcctgagaaattccagtccaagtatgagccccggagccacatgatggacgtccagggctccacccaggactcggccatcaaggacttcgtgctgaagtacgccctgcccctggttgg

SEQ ID NO: 1120 - DNA, 548 bp, Homo sapiens
  misc_feature 513: n = A,T,C or G
ccccagaggacccgttggacccagtggacctcctggcaaagatggaaccagtggacatccaggtcccattggaccaccagggcctcgaggtaacagaggtgaaagaggatctgagggctccccaggccacccagggcaaccaggccctcctggacctcctggtgcccctggtccttgctgtggtggtgttggagccgctgccattgctgggattggaggtgaaaaagctggcggttttgccccgtattatggagatgaaccaatggatttcaaaatcaacaccgatgagattatggcttcactcaagtctgttaatggacaaatagaaagcctcattagtcctgatggttctcgtaaaaacccagctagaaactgcagagacctgaaattctgccatcctgaactcaagagtggagaatactgggttgaccctaaccaaggatgcaaattggatgctatcaaggtattctgtaatatggaaactggggaaacatgcataagtgccaatccttngaatgttccacggaaacactggtggacagattcta

SEQ ID NO: 1121 - DNA, 278 bp, Homo sapiens
cggccgaggtccgccatggcgtgtgctcgcccactgatatcggtgtactccgaaaagggggagtcatctggcaaaaatgtcactttgcctgctgtattcaaggctcctattcgaccagatattgtgaactttgtttacaccaacttgcgcaaaaacaacagacagccctatgctgtcagtgaattagcaggtcatcagactagtgctgagtcttggggtactggcagagctgtggctcgaattcccagagttcgaggtggtgggactcaccgctctgg

SEQ ID NO: 1122 - DNA, 591 bp, Homo sapiens
ctgcagcggcagaggcagcatccagcggcggcgccagcagttccagtccgttgctttactttttgcttcaccgacatagtcattatgccgaagagaaagtctccagagaatacagagggcaaagatggatccaaagtaactaaacaggagcccacaagacggtctgccagattgtcagcgaaacctgctccaccaaaacctgaacccaaaccaagaaaaacatctgctaagaaagaacctggagcaaagattagcagaggtgctaaagggaagaaggaggaaaagcaggaagctggaaaggaaggcacagaaaactgaatctgtagataacgagggagaatgaattgtcatgaaaaattggggttgattttatgtatctcttgggacaacttttaaaagctatttttaccaagtattttgtaaatgctaattttttaggactctactagttggcatacgaaaatatataaggatggacattttatcgtctcatagtcatgctttttggaaatttacatcatcctcaagtaaaataaatatcagttaaatattggaagctgtgtgtaagattgattcagcattccatgcact

SEQ ID NO: 1123 - DNA, 454 bp, Homo sapiens
ccaattgaaacaaacagttctgagaccgttcttccactactgattaagagtggggtggcaggtattagggataatattcatttagccttctgagctttctgggcagacttggtgaccttgccagctccagcagccttcttgtccactgctttgatgacacccaccgcaactgtctgtctcatatcacgaacagcaaagcgacccaaaggtggatagtctgagaagctctcaacacacatgggcttgccaggaaccatatcaacaatggcagcatcaccagacttcaagaatttagggccatcttccagctttttaccagaacggcgatcaatcttttccttcagctcagcaaacttgcatgcaatgtgagccgtgtggcaatccaatacaggggcatagccggcgcttatttggcctggatggttcaggataatcacctgagcagtgaagccag

SEQ ID NO: 1124 - DNA, 219 bp, Homo sapiens
cctgctccagagcacggctgaccatttctgctccgggatctcagctcccgttccccaagcacactcctagctgctccagtctcagcctgggcagcttccccctgccttttgcacgtttgcatccccagcatttcctgagttataaggccacaggagtggatagctgttttcacctaaaggaaaagcccacccgaatcttgtagaaatattcaaactaat

SEQ ID NO: 1125 - DNA, 246 bp, Homo sapiens
ccagagctgggcccaagctgcgctggaatcgcagcaggagaggggagtgggctggttcttcccaccacttcccaggctctgacagccgagactcatttccaaggcacagcagctttctaaagggactgagtttggactgggttttggacctccaggggctggagcttcatcacctgggcagtgtcttttctcagagagcaggtttctttatagtttggaaataaatggttcacggttcaaaagaaa

SEQ ID NO: 1126 - DNA, 227 bp, Homo sapiens
ccattgttcccgtgcatcgaagcttgcaggcagcttcaggtcctcggtaaacataactctctggggtggcttgggcccacccaggaaggtaccacatagcctcttcaagtagctcatgtccacgttgtagaagttgtggccggcctgccacgtggtattccgtttgttgacatagttgaccagctcatccgacaggggatggaaagagggcctgctccgggcattgg

SEQ ID NO: 1127 - DNA, 377 bp, Homo sapiens
cctgccgtcgatgccagggaggccgacaggaccttcttttccagcggggccgatatttccaggggaaccaggaagacctctgggtcccatgagaccaggctccccagggcgaccagcatctccattaggtcctcggactccagcagggccacttgcaccacgactaccaggagggcccatgacgccagctctgccatcagctccaggaagaccacgagaaccaggactacctctcagcccaggaggtcctggagggccggcagatccagcttccccattagggcctctctttccttcttcaccactgggaccaggaggaccttggggcccagcagagccgggctcacccttgttaccgctctctcctttggagccag

SEQ ID NO: 1128 - DNA, 253 bp, Homo sapiens
gagagctattgctttgttaagatataaaaaggggtttctttttgtctttctgtaaggtggacttccagcttttgattgaaagtcctagggtgattctatttctgctgtgatttatctgctgaaagctcagctggggttgtgcaagctagggacccattcctgtgtaatacaatgtctgcaccaatgctaataaagtcctattctcttttatgagaaagaaaaagacactgtcctttaaagtgctgcagtatgg

SEQ ID NO: 1129 - DNA, 314 bp, Homo sapiens
ccaagagctacaatgagcagcgcatcagacagaacgtgcaggtgtttgaattccagttgacttcagaggagatgaaagccatagatggcctaaacagaaatgtgcgatatttgacccttgatatttttgctggccccccaattatccattttctgatgaatattaacatggagggcattgcatgaggtctaccagaaggccctgcgtgtggatggtgacacagaggatggctctatgctggtgactggacacatcgcctctggttaaatctctcctgcttggtgatttcagcaagctacagcaaagcccattgg

SEQ ID NO: 1130 - DNA, 239 bp, Homo sapiens
ccagtccaacctgctcctcattattgtataaatgagcagaatcaatatggcggaagtcagcttcaattgccaatttggtggcctctaaagctttacttttaggaacctctgcaggcgcataggtgccaaatcccaggacaggcatgaagtgaccatcattcagcttcacacactgatatttcgaatccatttctgtcactagcctggctagcaaatgtttcttcctccctcacaggcta

SEQ ID NO: 1131 - DNA, 402 bp, Homo sapiens
aaggagtcctgcttatcacaatgaatgttctcctgggcagcgttgtgatctttgccaccttcgtgactttatgcaatgcatcatgctatttcatacctaatgagggagttccaggagattcaaccaggaaatgcatggatctcaaaggaaacaaacacccaataaactcggagtggcagactgacaactgtgagacatgcacttgctacgaaacagaaatttcatgttgcacccttgtttctacacctgtgggttatgacaaagacaactgccaaagaatcttcaagaaggaggactgcaagtatatcgtggtggagaagaaggacccaaaaaagacctgttctgtcagtgaatggataatctaatgtgcttctagtaggcacagggctcccaggccaggac

SEQ ID NO: 1132 - DNA, 304 bp, Homo sapiens
ccaccccggagatgacacgaggctcacatgactctagacacttggtggaaagtgaggcgagaaaaacaatgacttgggccaattacacgactgcaaagctagagctgccaacagggctccagggagcttggcttctgtagaagttctaaggaagcggtacgaactccacggcggtggggcgctaactagcagggacccctgcaagtgttggtcgggggcctcgagctgcctgagctgacacgaggggaggggtctgtgtagccaacaggtgaccgaagggcttgcctgcccacagcttacttgg

SEQ ID NO: 1133 - DNA, 224 bp, Homo sapiens
ctgacattttctatagtagatatggaggaggtccaagactaactgtgaaagccctgtgtaaggaatgtgtagtagaacgttgtcgcatattgcgtctgaagaaccaactaaatgaagattataaaactgttaataatctgctgaaagcagcagtaaagggcagcgatggattttgggtggggaagtcctccttgcggagttggcgccagctagctcttgaacag

SEQ ID NO: 1134 - DNA, 250 bp, Homo sapiens
cctactctgctgaggtggcgcttcctgctaagggcccttctctgccctttctgccctccttcccatcccacatgctgagccgccacaaagaccaaagaagtgatggcttttctctgtcccctgctgctctgaggggagaggggtgggtctcctgagccactcagatgggaaagtcccttactcggcccctccctccccagcagccccaagctttacactggatgcagcgatcaacccaccactcaccagg

SEQ ID NO: 1135 - DNA, 315 bp, Homo sapiens
ccaatgggctttgctgtagcttgctgaaatcaccaagcaggagagatttaaccagaggcgatgtgtccagtcaccagcatagagccatcctctgtgtcaccatccacacgcagggccttctggtagacctcatgcaatgccctccatgttaatattcatcagaaaatggataattaggggggccagcaaaaatatcaagggtcaaatatcgcacatttctgtttaggccatctatggctttcatctcctctgaagtcaactggaattcaaacacctgcacgttccgtctgatgcgctgctcattgtagctcttgg

SEQ ID NO: 1136 - DNA, 377 bp, Homo sapiens; identical to SEQ ID NO: 1127

SEQ ID NO: 1137 - DNA, 250 bp, Homo sapiens
ctgttcaacttccaactctaaataggcaccattaaacaaaaaaccccagtattttaaatttctccagcacacattccaggatcaatgctctgaactgtaatcagctagtaattcataacgggaatacagccttagaatggaagctatattgcttccctgccccctttctcttacaattggagagtgtaggtattaagggatacaaagtcagaggaagaataattaaaaagaaaaatgcccaaagctgcag

SEQ ID NO: 1138 - DNA, 511 bp, Homo sapiens
  misc_feature 431: n = A,T,C or G
tcgaccaggtcctcctgggccatctggtccccgaggtcagcctggtgtcatgggcttccccggtcctaaaggaaatgatggtgctcctggtaagaatggagaacgaggtggccctggaggacctggccctcagggtcctcctggaaagaatggtgaaactggacctcagggacccccagggcctactgggcctggtggtgacaaaggagacacaggaccccctggtccacaaggattacaaggcttgcctggtacaggtggtcctccaggagaaaatggaaaacctggggaaccaggtccaaagggtgatgccggtgcacctggagctccaggaggcaagggtgatgctggtgcccctggtgaacgtggacctcctggattggcaggggccccaggacttagaggtggagctggtccccctggtcccgaangaggaaagggtgctgctggtcctcctgggccacctggtgctgctggtactcctggtctgcaaggaatgcctggagaaaga

SEQ ID NO: 1139 - DNA, 505 bp, Homo sapiens
ctgtggactccagcatgtttctgataattatgcaagcaacaattctgtagcctcaagtaagaccacctgtgaacttgatcattatctggcccaaatatgaagataaactataactttggagtttgtttcctatttgtattcacattctgcttcctaaatcagttttctaaattgtgcctgcaattaggcattggtcaggggtgaatggctcttttcacagagagtagccaaccagagacctttgctttgatatcatcaactgcagagaatgctgttgatgggaatgctggaagcagaaactttgtcatcggaaaaacttttcttgtatgcatgagactcaacatcaggatccacagcttaaagatgggaattcaggtatgaaagaaaacaggcaaggaggcactgagggagaaagacacagactttatcgctctgtggctcattgttactggaatattctaaaactcttgttcacatgctattatgacttataaagcagcaacag

SEQ ID NO: 1140 - DNA, 256 bp, Homo sapiens
ctgtagcttctgtgggacttccactgctcgggcgtcaggctcaggtagctgctggccgcgtacttgttgttgctctgtttggagggtttggtggtctccactcccgccttgacggggctgccatctgccttccaggccactgtcacagctcccgggtagaagtcactgatcagacacactagtgtggccttgttggcttggagctcctcagaggagggcgggaacagagtgacagtggggttggccttgggctgac

SEQ ID NO: 1141 - DNA, 371 bp, Homo sapiens
ccagggccccattctgtctgtgggactgtgggttctcagtggaattgttgcctttcttgtcgtggagaaatttgtgagacatgtgaaaggaggacatggtcacagtcatggacatggacacgctcacagtcatgcacgtggaagtcatggacatggaagacaagagcgttctaccaaggagaagcagagctcagaggaagaagaaaaggaaacaagaggggttcagaagaggcgaggagggagcacagtacccaaagatgggccagtgagacctcagaacgctgaagaagaaaaaagaggcttagacctgcgtgtgtcggggtacctgaatctggctgctgacttggcacacaacttcactgatggtctgg

SEQ ID NO: 1142 - DNA, 312 bp, Homo sapiens
  misc_feature 292: n = A,T,C or G
cctcccacactgtcaaatgtcaactccaccagcactgagacaatgagtagatgagaatgtagaaagagggaaggtggtaggtaaaggagcggaaggaagaggtggggaaagagggaaggtggtaggtaaaggagcggaaggaagaggtggggaaagagggaaggagagaagggaaggagggaagagaaagaaggaagaaaaggaaagcatggcccggctagagacaaagccagaggtgatcaggtcagcagcaggagaggctcagaagggagcctctcgggaagtgcaggcngccatgagggctcgtttcag

SEQ ID NO: 1143 - DNA, 367 bp, Homo sapiens
ccagacgtggtggctcacacctgcaatcccagcaccttaggaggccgaggcaggaggatccttgaggtcaggagttcgagaccagcctcgccaacatggtgaaaccccatttctactaaaatacaaaaaattagccaagtgtggtggcatatgcctgtaatcccaactactcagaaggccgaggcaggagaattacttgaacgcaggagaatcactgcagcccaggaggcagaggttgcagtgagccgagattgcaccactgcactccagcctgggtgactgagcaagactccatctcagtaaataaataaataaataaaaagcgctgcagtagctgtggcctcaccctgaagtcagcgggcccagg

SEQ ID NO: 1144 - DNA, 159 bp, Homo sapiens
cctggaggagcggccgcacacacagccaggcgctaggctccctgcgggacctcgggaagggggaagagcgtcaacgatttacggagggtccagccgctgggtcagattgagacaaaccattgtgtggttgggttcgggtcagcaggctggagagggttc

SEQ ID NO: 1145 - DNA, 450 bp, Homo sapiens
ccatgggtgtctggagcaccctgaaactgtatcaaagttgtacatatttccaaacatttttaaaatgaaaaggcactctcgtgttctcctcactctgtgcactttgctgttggtgtgacaaggcatttaaagatgtttctggcattttctttttatttgtaaggtggtggtaactatggttattggctagaaatcctgagttttcaactgtatatatctatagtttgtaaaaagaacaaaacaaccgagacaaacccttgatgctccttgctcggcgttgaggctgtggggaagatgccttttgggagaggctgtagctcagggcgtgcactgtgaggctggacctgttgactctgcagggggcatccatttagcttcaggttgtcttgtttctgtatatagtgacatagcattctgctgccatcttagctgtggacaaaggggggtcag

SEQ ID NO: 1146 - DNA, 324 bp, Homo sapiens
ccatacagggctgttgcccaggccctagaggtcattcctcgtaccctgatccagaactgtggggccagcaccatccgtctacttacctcccttcgggccaagcacacccaggagaactgtgagacctggggtgtaaatggtgagacgggtactttggtggacatgaaggaactgggcatatgggagccattggctgtgaagctgcagacttataagacagcagtggagacggcagttctgctactgcgaattgatgacatcgtttcaggccacaaaaagaaaggcgatgaccagagccggcaaggcggggctcctgatgctgga

SEQ ID NO: 1147 - DNA, 191 bp, Homo sapiens
ccacgaaaatcaatgagaagccacaggtgatcgcggactatgagagcggacgggccatacccaataaccaggtgcttggcaaaatcgagcgggccattggcctcaagctccggggaaaggacattggaaagcccatcgagaaggggcctagggcgaaatgaacacaaagcctcgaaatcagtgtgctccag

SEQ ID NO: 1148 - DNA, 344 bp, Homo sapiens
ctgtccaatgacaacaggaccctcactctactcagtgtcacaaggaatgatgtaggaccctatgagtgtggaatccagaacgaattaagtgttgaccacagcgacccagtcatcctgaatgtcctctatggcccagacgaccccaccatttccccctcatacacctattaccgtccaggggtgaacctcagcctctcctgccatgcagcctctaacccacctgcacagtattcttggctgattgatgggaacatccagcaacacacacaagagctctttatctccaacatcactgagaagaacagcggactctatacctgccaggccaataactcagccagtgg

SEQ ID NO: 1149 - DNA, 329 bp, Homo sapiens
ctgacccactcactgggcgggggcacaggctctggaatgggcactctccttatcagcaagatccgagaagaataccctgatcgcatcatgaataccttcagtgtggtgccttcacccaaagtgtctgacaccgtggtcgagccctacaatgccaccctctccgtccatcagttggtagagaatactgatgagacctattgcattgacaacgaggccctctatgatatctgcttccgcactctgaagctgaccacaccaacctacggggatctgaaccaccttgtctcagccaccatgagtggtgtcaccacctgcctccgtttccctgg

SEQ ID NO: 1150 - DNA, 406 bp, Homo sapiens
ccagttatttgcaagtggtaagagcctatttaccataaataatactaagaaccaactcaagtcaaaccttaatgccattgttattgtgaattaggattaagtagtaattttcagaattcacattaacttgattttaaaatcagttttgtgagtcatttaccacaagctaaatgtgtacactatgataaaaacaaccattgtattcctgtttttctaaacagtcctaatttctaacactgtatatatccttcgacatcaatgaactttgttttcttttactccagtaataaagtaggcacagatctgtccacaacaaacttgccctctcatgccttgcctctcaccatgctctgctccaggtcagcccccttttggcctgtttgttttgtcaaaaacctaatctgct

SEQ ID NO: 1151 - DNA, 346 bp, Homo sapiens
ctgcgtgagtaccaggagctgatgaacgtcaagctggccctggacatcgagatcgccacctacaggaagctgctggagggcgaggagagccggctggagtctgggatgcagaacatgagtattcatacgaagaccaccagcggctatgcaggtggtctgagctcggcctatgggggcctcacaagccccggcctcagctacagcctgggctccagctttggctctggcgcgggctccagctccttcagccgcaccagctcctccagggccgtggttgtgaagaagatcgagacacgtgatgggaagctggtgtctgagtcctctgacgtcctgcccaagtgaacag

SEQ ID NO: 1152 - DNA, 427 bp, Homo sapiens
ctggactgctgtacatcaaggacagattaactggaaaacatatgttccttatgcgtgatcgagagccattcagaaaagacttcctttgtgttcagcctatacttttccatatggtataccttgaaaaaaattagcacaccatggttatttttctaccttttataaaagacagagcctgtttactcatttagaagatagagaaaattggtctaaaattgaacatcctagattcacactcccaagtcacttaaggtgatttgatggtgaggaaaatgattgacagagcccaacaatgatctcaggaattacattttccaacagaccaaaaaatgttttcatgtagcagcaatgcagatttggtgaatatttaatatatattttagtatgtatttcactttatgactgacaattaaaaaatattgtttgg

SEQ ID NO: 1153 - DNA, 331 bp, Homo sapiens
ctggccggcggtgcagatctggagtccagcctcagggatgcgctactttccattctctgcattgaacattcgttctgtcagcatccgctccagcttcactgcatcagcggcaaacttgcggatcccgtcagagagcttctccacagccatctggtcctcgttgtgcaaccaacggaaagacttctcatccaggtggattttttccaggtcactggcttgggctgggggacaagaaccagccttccatgcctgctccatgtccctgcccaccttggccccttgggctcagggcctgaaccgctgcacccaagcatctcccaccagggccagg

SEQ ID NO: 1154 - DNA, 403 bp, Homo sapiens
ctgaactttcagatgaagttgacttctacttgattgcaggattcagggtttctcagatgttaatacagagtcaaaagcggtggataaaaccttgcaaatggcttgtgcttgttccaggctgttgcactgataaacccacaggctgtattcctcattgcttgcatctgtggtcttcagagccagtaagctttttcccgcccccagaccgtcatcgtaacacaccatccggattattaagtagagagcatgcctgtgcaaaacatcatattgatctgatgttgatacttttatgccatacttggaaactcccataataaattcttcctccggaggaacaaaaggcaactttccatcttgctgggcaacgtctatataatttatcaggtctaatggcccttcaagg

SEQ ID NO: 1155 - DNA, 491 bp, Homo sapiens
cctccctctcagagcttgccccagggactctctggccctcagggttcaatgtattctgaccaaggccaagctttcctggggctcagggaaaatcacactttgctacccgaagctgtatcccctcagatgccaggaaggccgtgatcatctgactccaccctcctgagacacattctctccctgactgtcctgttctaagtcagcggagcaccttaggatggaggggtggaggcgaggccagatgcagcctctgtgaacaggtgcctggaggctgggaaatgaccctgagagggcaggacacagcaaccgtgggcttaaggtgaccttgagagcaagcttggcccactttacaattctgttcagagccagcccctaacatggtggtcatttattcatttgttccctcattttaaaaaatgtaaggccaggcatggtggctcacgccgggtaatcccagcactttgggaggccgaggcaggcagatcacctga

SEQ ID NO: 1156 - DNA, 586 bp, Homo sapiens
agcaaatagaagcaatcagggcactgcaagttgtgactactccaagatgtgaatcatggatcatgcaaattacaatcatgttttaacctgacctccaaagggagaataaagtaaaaattatcccatgtgaggattattcaccagtttatatgtcattagttaccagtttttctttatgaataatgtttagcaatattataaagtatatctaatagttatcaggtttttggcttgttactttttggtagtaacttataaaactgactggaaaagaccaataaggcactgtttgcatgttacaaattatatccaaagaccaaaagctgttaataagaaatcttccaataaaaccacatcatattttcttttttatttacacccacatcaggattacaactttatcaggactgcaccttgatcaggaagggatgtttctcttacaaggctaataagaaaggaacaataaatttgctgatgaaaaaagtcatgcatttaaaaattttaactttaatttttaattgagggcaatattttaaagaaatgctcattagtcattcctttaaattgtgtgtgtgagagagagaaa

SEQ ID NO: 1157 - DNA, 392 bp, Homo sapiens
  misc_feature 373, 389: n = A,T,C or G
cctccggctggtgttctgagggttgccaggccatcgtggacacaggcacctctctgctcactgtgccccagcagtacatgagtgctcttctgcaggccacaggggcccaggaggatgagtatggacagtttctcgtgaactgtaacagcattcagaatctgcccagcttgaccttcatcatcaatggtgtggagttccctctgccaccttcctcctatatcctcagtaacaacggctactgcaccgtgggagtcgagcccacctacctgtcctcccagaacggccagcccctgtggatcctcggggatgtcttcctcaggtcctactattccgtctacgacttgggcaacaacagagtaggctttgccactgncgcctagacttgctgnctc

SEQ ID NO: 1158 - DNA, 375 bp, Homo sapiens
gggaaaaataattttattcctcaaatgatcagcacattcagaagcaggacagaggagctctgatgacatctctgggggactcaaagcggccctcattttctggtattttcccaggtgattctcttccaacctgtgagtcctgctctctttcctcccatctgaagtttgagacatcctctgccacaaggaaagccaccaataccagcccaaagagccaccagagaggaaccaaaccacatgcatcaagttataggaaggatgcaagaagggaaattaggaaggaaagggaggagtttagttggcattctggggcatgctaacatgagggcgatggtctctctccaagtcgctggacatatcccttttctttccagg

SEQ ID NO: 1159 - DNA, 361 bp, Homo sapiens
  misc_feature 338: n = A,T,C or G
gtttattgtaaaaaacaaaaaactctgtattgtgcacatgaagacctggagatgtgccgacttcctgtccccaaagccaatcttccccgccaaggcgactgaggatttcaagggctcagagttactgcaggaatccaggtgacaccaggaagagaagggggaggaggggaatcggaggggatgggtttaaaaggcagaggggagggagatggaagggaatgaggaggagggagactgagggggctgcctttccttggggactggggaactcatgccctgcccccacccgcagggctccaggggtgagagaaaggggtggagaataaagaattgggcancagggtgatggggggaacagcag

SEQ ID NO: 1160 - DNA, 142 bp, Homo sapiens
cgcaatgttgccagtgtctgtctgcaggttggctacccaactgttgcatcagtaccccattctatcatcaacgggtacaaacgagtcctggccttgtctgtggagacggattacaccttcccacttgctgaaaaggtcaagg

SEQ ID NO: 1161 - DNA, 193 bp, Homo sapiens
ccaaagcctacgaccacctcttcaagttgctgctgatcggggactcgggggtgggcaagacttgtctgatcattcgctttgcagaggacaacttcaacaacacttacatctccaccatcggaattgatttcaagatccgcactgtggatatagaggggaagaagatcaaactacaagtctgggacacggctgg

SEQ ID NO: 1162 - DNA, 265 bp, Homo sapiens
cctgggtgccacgattcccagcctggagcgcagccaggacgtgggagaccttctcagagactctccgggcacactctatgagctccttcttggtgtaggcatcactggggctgcactgcagggcgcctgccttggtgaccagagcggcacagccatggcccagctcctgtacccggtgtttgatatgggaacctatctcttcattttcagcagccaccgctgcaggcttggcctccgaggccagacggccatagtcactggtcag

SEQ ID NO: 1163 - DNA, 337 bp, Homo sapiens
  misc_feature 15, 204, 205, 212, 224, 263, 285, 293: n = A,T,C or G
ctgcagagtgggganaggcttttgccactagaaacttccaggatgcacgagatcaaggaattaagtctgtaacaaaataacaggatgctctgtgaagtccaaagaattgcttgaggcaaactgcagagctccatgagatcagcaaccccaagagcttttacaccgccggacacggtttaataggaaaaaaatctcctatactgnntattcanaaccaaatgaanagaaatgtcaaaggagtcggaaacaatatgtcaaattangtaaattcctgacctgacccanattttgcngaacatttgatcctaaactgtgctgtccacgtccttaggatcac

SEQ ID NO: 1164 - DNA, 368 bp, Homo sapiens
  misc_feature 221, 226, 233, 242: n = A,T,C or G
ccagacgtggtggctcacacctgcaatcccagcaccttaggaggccgaggcaggaggatccttgaggtcaggagttcgagaccagcctcgccaacatggtgaaaccccatttctactaaaaatacaaaaaattagccaagtgtggtggcatatgcctgtaatcccaactactcagaaggccgaggcaggagaattacttgaacgcaggagaatcactgcancccangaggcanaggttgcantgagccgagattgcaccactgcactccagcctgggtgacagagcaagactccatctcagtaaataaataaataaataaaaagcgctgcagtagctgtggcctcaccctgaagtcagcgggcccagg

SEQ ID NO: 1165 - DNA, 267 bp, Homo sapiens
  misc_feature 179, 211, 214, 235, 251, 252: n = A,T,C or G
ctgggaaggaggctcctccgccttctcctgtttgtcatcctcctcatcagactcgacctccatctcaacttcctcactctccccaaacttttcatagcgctcctgaatgaggattcgggcccccagctcctctggcgtggtggggggagggaagttcccttgctcattgggttggaagnccactgtttccaccaccacaaaatcatgccantcnatctgagcataggccacccgntccttctccttctccnnttcttccttcttcct

SEQ ID NO: 1166 - DNA, 433 bp, Homo sapiens
  misc_feature 142, 323, 354, 376, 381, 382, 402, 408, 422: n = A,T,C or G
ctgtctgtacactttttcttgggggaagagttcttgtcttcagtttactgcagtagggttcctggctctgttacatgctcatgtgttccggaagaacacatgaaatatcatcccacggatgacgatacagcccctgcttcancctcttctgatcaagatagtgtccaatgaaccccatactccttcccagcacaaagatgccattgagggctccaatgtcaatatattcatcagcttcctccctgcaacacacatcaacttgtagttttaaaaggctcacgtgactgccctcctccccacagacagtactactactgcccaanaatgagaagaaaaggggtgctctgggtggtngcattacaggcaatttttgttntcttnnttatacctctccttattttncaaatnttctattatgagtntgcattacttt

SEQ ID NO: 1167 - DNA, 362 bp, Homo sapiens
cctctggctctttcttcagccacttctccagctcctgcaggttctggtctgagtagtcagtgacgacgatctccttaaaggattcacaagcagagaggagctgatagatagtggggccagagccgatgtcaatcagcaggtctcccttcacaccgtctaggcagaatatcttgaaaagatttttcagaaggtgcttaagaatctggctttctgcagagtgcctagaaccaaacttgtaatatttttctaggtaatcccgagggttaaaatggcttagataggtgtccttggaggtgaagcctgattccattatgtctcacttccgtaccactggagcactgccctccttctctttcctccag

SEQ ID NO: 1168 - DNA, 459 bp, Homo sapiens
  misc_feature 370, 382, 406: n = A,T,C or G
gcagtcatggggcccaggaccatgccactggccctgctcccccagccgcagcctcacctgcaggtgctcctcgatgtccttgcggtcgtaggtgatgccactgggcgtgatgcacggctcccgcatcagctcaaagctgatcttgccacacaggtagtcggggatgtctcgcttctgtggcacaggggcacacggtcagaggctgaaaaggggcactgcacgagcacctgccagccatcggcagcaagcgacacacactcaccttcctcttctcatccacctgagaaaaaagctcgtccatgtccgccatgtacttgtcctgtgaagagttgagtgctgtgcttgggggagacaccccacctccctcctncatggggcacanacccaacacaaggcggggatgctnccacgccacgtgcacacacacagacccacatgtgggtggggggcaccctcacg

SEQ ID NO: 1169 - DNA, 386 bp, Homo sapiens
ccaggccacctgtgcggggctcctcgatgtggaaggttcgggtgaggagattgtagaaggagccgtagcacacggccaccacagtgcacgtgaggcagatcacgctgtagggcatgctgaagtccggtgtcggcaggttcaccagcagcggctccgtgtagagccgcacaaagtagttagagccatcagagactgggaacaggctgttgaagaggggactctcttcccagtccactggcttggctgctaccatgctgggcacaagggcgctgaggacagatgggctgacatagaagccatggttaggatctggcgtgtactcggtccacttcagcagcgcccgctcaaactggatggaaaccttggtgactgagttggccggccag

SEQ ID NO: 1170 - DNA, 480 bp, Homo sapiens
ctatttctctgttagtgtttaaccaaccatctgttctaaaagaagggctgaactgatggaaggaatgctgttagcctgagactcaggaagacaacttctgcagggtcactccctggcttctggaggaaagagaaggagggcagtgctccagtggtacagaagtgagacataatggaatcaggcttcacctccaaggacacctatctaagccattttaaccctcgggattacctagaaaaatattacaagtttggttctaggcactctgcagaaagccagattcttaagcaccttctgaaaaatcttttcaagatattctgcctagacggtgtgaagggagacctgctgattgacatcggctctggccccactatctatcagctcctctctgcttgtgaatcctttaaggagatcgtcgtcactgactactcaggaccagaacctgcaggagctggagaagtggctgaagaaagagccaga

SEQ ID NO: 1171 - DNA, 317 bp, Homo sapiens
cctcagcagccctgccacggatctgcccgattctttcgcatcaagaagttgatcttgcgagccatttccatgttgtagatccgccggcacctttcatagctttccctctgtcgccggcggcatggcttctcataataccgccgatgcttaatgtcctcaatgagcccatccatagtgaggattctgtttagggtcctgtatgcgctttccacgttcccttcctgtaccatcacagtcctggcgatgaacttcagatgttttgccatgaccttggatttaaaccttcactctgtagagcctcgcgcgctcagtaccta

SEQ ID NO: 1172 - DNA, 202 bp, Homo sapiens
  misc_feature 32, 62, 70, 71, 77, 90, 111: n = A,T,C or G
ggcaacgggaggaacagcagcagaggcagcangagcaggaggagcgtgaacgagaagagcancggcgatnngctgcnctcagtgaccganagaagagagctctggctgcanagcgccgactcgctgcccagttgggagcccctacctctccaatccctgactctgcaatcgtcaatactcgacgctgctggagttgtggggc

SEQ ID NO: 1173 - DNA, 173 bp, Homo sapiens
ctgcctgggttgtggccgccctagcatcctgtatgcccacagctactggaatccccgctgctgctccaggccaagcttctggttgattaatgagggcatggggtggtccctcaagaccttcccctaccttttgtggaaccagtgatgcctcaaagacagtgtcccctccacag

SEQ ID NO: 1174 - DNA, 301 bp, Homo sapiens
ccaagagctacaatgggcagcgcatcagacagaacgtgcaggtttttgagttccagttgactgcggaggacatgaaagccatagatggcctagacagaaatctccactattttaacagtgatagttttgctagccaccctaattatccatattcagatgaatattaacatggagagctttgcctgatgtctaccagaagccctgtgtgtggatggtgacgcagaggacgtctctatgccggtgactggacatatcacctctacttaaatccgtcctgtttagcgacttcagtcaactacag

SEQ ID NO: 1175 - DNA, 537 bp, Homo sapiens
cctgcagggctcggccgtaggagaaggtcagggcccagggcttcagcagggggcacttgttaatggcattgaggttgatggacgcctcctcctcactctggcctccagacaggaaggtgatcccagtgacagcggggggcactgtgcggcgcagcgctgtgacggtcgccatggcaatctcctcatgagaaaacttctgagtgcaagcatggcctggggtgaccatgttgggcttcagcaaggtgccttccaggtagatgtggtggtcactcagagccttgtagacagcagccagcaccttctcggtcacatactggcagcgcttcaagtcatggtccccatcagggaggatctcaggctccacgatgggcacaatgccattctgctggcagatactggcataacgggccagaacattggcattttccatgatggcgagggctgagggggtgtgttccccaatcttcagcacacaacgccacttggcgaagtcagctccgtccttcttgtactgggcacagcgctcagacagcccat

SEQ ID NO: 1176 - DNA, 384 bp, Homo sapiens
  misc_feature 268, 285, 334, 360, 361, 368: n = A,T,C or G
ctgacaaaaaatgtgaaatttccacaaaatatccaacttatgtgactaaacgcagtagtttttttaaaaggggagatagaaaataaatggttttgttggagtgcattttagtaagcctttgcagtaaaatgacggttgtaactactaaaccaaatttagttttcacagcatggttttgttgttttccccttgtttttcagaggtaaattttgcattatatccttcagtattttaacactattttggcagtttacacattactttttgnttttccttcctttttgngaaatgtattaagttgtggttcttattgaaacagtattatataatgttngcttaattatatcatgtgatgctcanntctattntgatttattcattagt

SEQ ID NO: 1177 - DNA, 562 bp, Homo sapiens
  misc_feature 492, 541, 550: n = A,T,C or G
ccaacaacatgcaggaagctcagagtatcgatgaaatctacaaatacgacaagaaacagcagcaagaaatcctggcggcgaagccctgggctaaggatcaccattactttaagtactgcaaaatctcagcattggctctgctgaagatggtgatgcatgccagatcgggaggcaacttggaagtgatgggtctgatgctaggaaaggtggatggtgaaaccatgatcattatggacagttttgctttgcctgtggagggcactgaaacccgagtaaatgctcaggctgctgcatatgaatacatggctgcatacatagaaaatgcaaaacaggttggccgccttgaaaatgcaatcgggtggtatcatagccaccctggctatggctgctggctttctgggattgatgttagtactcagatgctcaatcagcagttccaggaaccatttgtagcagtggtgattgatccaacaagaacaatatccgcagggnaaagtgaatcttggcgcctttaggacatacccaaagggctacaaacctnctgatgaangaccttctgagt

SEQ ID NO: 1178 - DNA, 353 bp, Homo sapiens
  misc_feature 117: n = A,T,C or G
cgcgtctggatggccgaatcattcgcacagactgggacgcaggctttaaggagggcaggcaatacggccgtgggcgatctgggggccaggttcgggatgagtatcggcaggactacnatgctgggagaggaggctatggaaaactggcacagaaccagtgagtggtgagagctctgtcagtgacaaacactcctttggcctgttgaatttgctgaagaacatcacctaaagtctgcacacgagcccatttttaccaagatttgatcagtgtctttactgagctggaagcctctgaaagttattaaaggacagaatccaaaagaatgcctttaattcttgtctgagaatcttgg

SEQ ID NO: 1179 - DNA, 288 bp, Homo sapiens
ccaatgggatcctcaaggtgcctgccatcaatgtcaatgactccgtcaccaagagcaagtttgacaacctctatggctgccgggagtccctcatagatggcatcaagcgggccacagatgtgatgattgccggcaaggtagcggtggtagcaggctatggtgatgtgggcaagggctgtgcccaggccctgcggggtttcggagcccgcgtcatcatcaccgaggttgaccccatcaacgcactgcaggctgccatggagggctatgaggtgaccaccatggatgagg

SEQ ID NO: 1180 - DNA, 523 bp, Homo sapiens
ctggagagatggagcggtgggcaccgtcatccttcctcatcagccacatagaaggacagtggcgatttcagcccagcttttctgactgcttgtaaattgaagcccagaactggtttgccacctgtgggatcgactcagcattttaaaataggaggcagtcgtgagtgcaggtttcttgcagctccgggtggccctgggctccaggtcaggagacctcagctcctgtccctgatctgtggttgtcaagccttgcagactctaaactcagcatctttatctgtcagacgtagacacgtggctcccgtggttggtgcggttggaatagctgaggtaatacacggacctccaagcactagagcagtatgaggagttctgaggaatggttatcctgcggtgcctgtggtccacagcaagccattcttatcccatccggtttacttcccacagccactttgtaagcataggcattatcctctaccccatcatagaaatgaggaaaagaatcaccaagagagtaagcagc

SEQ ID NO: 1181 - DNA, 493 bp, Homo sapiens
  misc_feature 438, 479: n = A,T,C or G
cacagatgaaggctttgtgatacctgatgaagggggcccacaggaggagcaagaagagtattaacagcctggaccagcagagtaacatcggaattcttcactccaaatcatgtgcttaactgtaaaatactcccttttgttatccttagaggactcactggtttcttttcataagcaaaaagtacctcttcttaaagtgcactttgcggacgtttcactccttttccaataagtttgagttaggagcttttaccttgtagcagagcagtattaacacctagttggttcacctggaaaacagagaggctgaccgtggggctcaccatgcggatgcgggtcacactgaatgctggagagatgttatgtaatatgctgaggtggcgacctcagtggagaaatgtaaagactgaattgaattttaagctaatgtgaaatcanagaatgttgtaataagtaaatgccttaagagtatttaaaanatgcttccacattt

SEQ ID NO: 1182 - DNA, 329 bp, Homo sapiens
cgcgtctctgacactgtgatcatgataggggttcaaacagaaagtgcctgggccctccttctaagtcttgttaccaaaaaaaggaaaaagaaaagatcttctcagttacaaattctgggaagggagactatacctggctcttgccctaagtgagaggtcttccctcccgcaccaaaaaatagaaaggctttctatttcactggcccaggtagggggaaggagagtaactttgagtctgtgggcctcatttcccaggtgccttcaatgctcatcaaaaccaggcatggggaaggccctggcaaactgctccacccgttgcctgaggttgg

SEQ ID NO: 1183 - DNA, 198 bp, Homo sapiens
cctgacagacagaagggcttggagattttttttctttacaattcagtcttcagcaacttgagagctttcttcatgttgtcaagcaacagagctgtatctgcaggttcgtaagcatagagacgatttgaatatcttccagtgatatcggctctaactgtcagagatgggtcaacaaacataatcctggggacatactgg

SEQ ID NO: 1184 - DNA, 224 bp, Homo sapiens
ctggaggtgcctcagaaggtgcattctgcttcctgcaggggcttgaaacaccaaggcactccagggatcctggagtcaaagcagcagccccggttgttgcactccttgggggtgacatgggggtagccgcagtccaccctgtccttggctggcacggcacactggtttgcagacaggcccacgtactcctcagcagagctggaggacagcaaggccaggaccag

SEQ ID NO: 1185 - DNA, 367 bp, Homo sapiens
ccttttacagatgtcagctttcactggcctccatgcacaacctcccactaccacccaatctgcctgccacagcaaagtgcaggcaccctgggccccctggaggatgcgggcaggggctacagggcatccaggatgtggtcgatcttggtgaccagctcctggcgctttcctgagatgagcttctcattctcaatgtacgtgtctttcttgagcttgccagccaccaggcgctcagcctccaccgccgacttcagcaccagctccttgacctgtgcatccagcttctgcatttcgctcactctgtcgcacagatcagagccctctgtcttcagcctggactgcagcagtgcaatctcactggtcaagg

SEQ ID NO: 1186 - DNA, 188 bp, Homo sapiens
ccattaagcggatgctggagatgggagctatcaagaacctcacgtccttccgacctgggcaagagctgtagcctgtcggttgcctactctgctgtctgggtgacccccatgcgtggctgtgggggtggctggtgccagtatgacccacttggactcaccccctcttggggagggagtcctgggcctgg

SEQ ID NO: 1187 - DNA, 379 bp, Homo sapiens
gttgatgctactctgaagtctctcaacaaccagattgagacccttcttactcctgaaggctctagaaagagcccagctcgcacatgccgtgacttgagactcagccacccagagtggagcagtggttactactggattgaccctaaccaaggatgcactatggatgctatcaaagtatactgtgatttctctactggcgaaacctgtatccgggcccaacctgaaaacatcccagccaagaactggtataggagctccaaggacaagaaacacgtctggctaggagaaactatcaatgctggcagccagtttgaatataatgtagaaggagtgacttccaaggaaatggctacccaacttgccttcatgcgcctgctgg

SEQ ID NO: 1188 - DNA, 384 bp, Homo sapiens
cgcgtcggactgcagccagtccgtttcctttctttagccagccatcctggtactgtagtttaggggttgatggtggttgaaattgatttctggctggttactaaggtgcctgctagccattgtataaaattaaaacatgaagaatattttttttttgagcatggctagtggatttaaaacaacacatacctgtcactgctggagtcaaacttataaaaagccttaagtggaaagtgttccagacggagactctgagttaatagaggagtagaagctggtgttaaagttcccacgacgcacatggctttgccagaaactctgtttaatgatcggcctttcacctcttcacttatccttagtcccagtagccaggatacctgatgg

SEQ ID NO: 1189 - DNA, 419 bp, Homo sapiens
  misc_feature 348, 349: n = A,T,C or G
ggaaaaaccagccactgctttacaggacagggggttgaagctgagccccgcctcacacccacccccatgcactcaaagattggattttacagctacttgcaattcaaaattcagaagaataaaaaatgggaacatacagaactctaaaagatagacatcagaaattgttgagttaagctttttcaaaaaatcagcaattccccagcgtagtcaagggtggacactgcacgctctggcatgatgggatggcgaccgggcaagctttcttcctcgagatgctctgctgcttgagagctattgctttgttaagatataaaaaggggtttctttttgtctttctgtaaggtnnacttccagcttttgattgaaagtcctagggtgattctatttctgctgtgatttatctgctgaaagctcag

SEQ ID NO: 1190 - DNA, 173 bp, Homo sapiens
ccaggtactggcacatcatgctctggatgggggtggtggtgtcctgtaggcagagaaacaggaaattgtcgtagtcagtatcgagcagcgtggcctcgttcgccaccgtatagttgatcttgaacttctttggattctcagtcttctctccaaggaccttcttctcaacacag

SEQ ID NO: 1191 - DNA, 341 bp, Homo sapiens
cctcctgccagcagttcttgaagcttctttttcattcctgctactctacctgtatttctcagttgcagcactgagtggtcaaaatacatttctgggccacctcagggaacccatgcatctgcctggcatttaggcagcagagcccctgaccgtcccccacagggctctgcctcacgtcctcatctcatttggctgtgtaaagaaatgggaaaagggaaaaggagagagcaattgaggcagttgaccatattcagttttatttatttatttttaatttgttcttttctccaagtccaccagtctctgaaattagaacagtaggcggtatgagataatcagga

SEQ ID NO: 1192 - DNA, 324 bp, Homo sapiens
ttggaggttggcggcgcggggctgaaggctagcaaaccgagcgatcatgtcgcacaaacaaatttactattcggacaaatacgacgacgaggagtttgagtatcgacatgtcatgctgcccaaggacatagccaagctggtccctaaaacccatctgatgtctgaatctgaatggaggaatcttggcgttcagcagagtcagggatgggtccattatatgatccatgaaccagaacctcacatcttgctgttccggcgcccactacccaagaaaccaaagaaatgaagctggcaagctacttttcagcctcaagctttacacag

SEQ ID NO: 1193 - DNA, 521 bp, Homo sapiens
ctgctttgttttctgttggcagtggagggacaaggtgagaggagccaggggtagtcatgaacaccagtgggttctgccctgggcagctccccaccttctttaagagagtactgtgtctcagctccagcagtctcaactgggaagacccaggactcctgctcttttctctaatccctgggagacgaggtccagctaaggtagagtaagcagtcagtgaccaggcaggctggtttgggaggtcactgcctggaggacgggatcttgtattcttcggaagatggctgggaaattcttccctccattacgtagaactttcttcccctcctcagttgaggtgcctagatgtcccacaacggggtcttcactcaggtcctccagaggcacacgctcaaacagtgggtgctcttcgaaatgagtgcacatccagtcgtgtagctccagcacatcggttatggtatacaccagcccctgcataggcaaaatcaccctagacaggaggctgcatgcaacgtcagcagcca

SEQ ID NO: 1194 - DNA, 208 bp, Homo sapiens
ccagtgactagaaggcgaggcgccgcgggaccatggcggcggcggcggacgagcggagtccagaggacggagaagacgagggagaggaggagcagttggttctggtggaattatcaggaattattgattcagacttcctctcaaaatgtgaaaataaatgcaaggttttgggcattgacactgagaggcccattctgcaagtggacag

SEQ ID NO: 1195 - DNA, 499 bp, Homo sapiens
ccagaaaggaaagacaataattttgttttttcattttgaaaaaattaaatgctctctcctaaagattcttcacctactttggtctccataacttctatgttttctttccttctgacacactagtgcccctaaattgtgatttgcctatacgtttagggccggggttggaagatgttaacaaccatttaagattcatttctgcagtgggagtgggtggagtttcaccctctgggaaaggggcaggtgacaggtatttatcagtcagtgcctctctagctcttgtaggaagaagcacacgcaggatggagtctagaggatgagcgatattgactagcaattcatgggctccctccagcagtgcgagggtcagagtttctggagccttgggaggaggcatccctgtgagggggggttagggagatgggagggcaccaggaaaagtgattagaagtcaggtatgggaaggctaaattaggacagagtcgagtacatctctgct

SEQ ID NO: 1196 - DNA, 455 bp, Homo sapiens
ctgacccccctttgtccacagctaagatggcagcagaatgctatgtcactatatacagaaacaagacaacctgaagctaaatggatgccccctgcagagtcaacaggtccagcctcacagtgcacgccctgagctacagcctctcccaaaaggcatcttccccacagcctcaacgccgagcaaggagcatcaagggtttgtctcggttgttttgttctttttacaaactatagatatatacagttgaaaactcaggatttctagccaataaccatagttaccaccaccttacaaataaaaagaaaatgccagaaacatctttaaatgccttgtcacaccaacagcaaagtgcacagagtgaggagaacacgagagtgccttttcattttaaaaatgtttggaaatatgtacaacttcgatacagtttcagggtgctccagacacccatggacctg

SEQ ID NO: 1197 - DNA, 444 bp, Homo sapiens
cctggatgtggctcttcgcactgaaggccaagtagtagatcacaaggccgatcgccgcagccagcacctcagtggacacccagggcccgttccaagtgccccgatggtccacgctgactgtaaacagaggcgggatgatggaaatgtcctcgttattcctctgagccttcctgaggaggctgtaggactcctcgtcgaagaatctaacctcataggtgcctgcgtgggcgctcttgtggttcaggcttcaggacacctgataacgccccacatcctggcctcgagtgacagggaattgttttccaccgacgtcagcatagagagccatgttctggaccctgttcttgcatgtcagggagatctccacaatgaagacggtctcagtggaaatgacagcgtcagaagtggtgtagtaggaaggggtgatctggggctccaggcagg

SEQ ID NO: 1198 - DNA, 450 bp, Homo sapiens
ccatgggtgtctggagcaccctgaaactgtatcaaagttgtacatatttccaaacatttttaaaatgaaaaggcactctcgtgttctcctcactctgtgcactttgctgttggtgtgacaaggcatttaaagatgtttctggcattttctttttatttgtaaggtggtggtaactatggttattggctagaaatcctgagttttcaactgtatatatctatagtttgtaaaaagaacaaaacaaccgagacaaacccttgatgctccttgctcggcgttgaggctgtggggaagatgccttttgggagaggctgtagctcagggcgtgcactgtgaggctggacctgttgactccgcagggggcatccatttagcttcaggttgtcttgtttctgtatatagtgacatagcattctgctgccatcttagctgtggacaaaggggggtcag

SEQ ID NO: 1199 - DNA, 294 bp, Homo sapiens
agtcacagttgcacctattcaaaactagctttaaagtgagctatttttaaacttcataaaaatattcatgattttattagtttgaatatttctacaagattcgggtgggcttttcctttaggtgaaaacagctatccactcctgtggccttataactcaggaaatgctggggatgcaaacgtgcaaaaggcagggggaagctgcccaggctgagactggagcagctaggagtgtgcttggggaacgggagctgagatcccggagcagaaatggtcagccgtgctctggagcagg

SEQ ID NO: 1200 - DNA, 258 bp, Homo sapiens
agctacctaagaacagctaaaagagcacacccgtctatgtagcaaaatagtgggaagatttataggtagaggcgacaaacctaccgagcctggtgatagctggttgtccaagatagaatcttagttcaactttaaatttgcccacagaaccctctaaatccccttgtaaatttaactgttagtccaaagaggaacagctctttggacactaggaaaaaaccttgtagagagagtaaaaaatttaacacccatagtagg

SEQ ID NO: 1201 - DNA, 403 bp, Homo sapiens
ctgagctgctgtctgctttggaaaaccgttcctgccgctgccgatggatggaaatgcaatggatttcagcttcttatcatcagccagggccaagcagtttttcactgtcttttccagaagttcttcacacttgtctgcaccccaaactggactattacagtggatcacaaacttggcaggcaggccatggcctgcgctgacagcagctccagctacttccaagggcccgttctttttccggagttccaggacagcttccacaaactccttgccacctttcttctccagcgtgtttcctaggtcatctttaaggtcaatgtcagcattggtaggattgattatggcctccacctcaaagccggctaaattactgatttcactgtgaataaggttcggcttctgg

SEQ ID NO: 1202 - DNA, 325 bp, Homo sapiens
ctgaacctgcgggagtcggccaccatcacgtgcctggtgacgggcttctctcccgcggacgtcttcgtgcagtggatgcagagggggcagcccttgtccccggagaagtatgtgaccagcgccccaatgcctgagccccaggccccaggccggtacttcgcccacagcatcctgaccgtgtccgaagaggaatggaacacgggggagacctacacctgcgtggtggcccttgaggccctgcccaacagggtcaccgagaggaccgtggacaagtccaccggtaaacccaccctgtacaacgtgtccctggtcatgtccgacacag

SEQ ID NO: 1203 - DNA, 518 bp, Homo sapiens
ctcaaccacagtctgacaccagagcccacttccatcctctctggtgtgaggcacagcgagggcagcatctggaggagctctgcagcctccacacctaccacgacctcccagggctgggctcaggaaaaaccagccactgctttacaggacagggggttgaagctgagccccgcctcacacccacccccatgcactcaaagattggattttacagctacttgcaattcaaaattcagaagaataaaaaatgggaacatacagaactctaaaagatagacatcagaaattgttaagttaagctttttcaaaaaaccagcaattccccagcgtagtcaagggtggacactgcacgctctggcatgatgggatggcgaccgggcaagctttcttcctcgagatgctctgctgcttgagagctattgctttgttaagatataaaaaggggtttctttttgtctttctgtaaggtggacttccagcttttgattgaaagtcctagggtgattctatttctgctg

SEQ ID NO: 1204 - DNA, 352 bp, Homo sapiens
ggggaaaggaggtctcactgagcaccgtcccagcatccggacaccacagcggcccttcgctccacgcagaaaaccacacttctcaaaccttcactcaacacttccttccccaaagccagaagatgcacaaggaggaacatgaggtggctgtgctgggggcaccccccagcaccatccttccaaggtccaccgtgatcaacatccacagcgagacctccgtgcccgaccatgtcgtctggtccctgttcaacaccctcttcttgaactggtgctgtctgggcttcatagcattcgcctactccgtgaagtctagggacaggaagatggttggcgacgtgaccggggcccagga

SEQ ID NO: 1205 - DNA, 250 bp, Homo sapiens; identical to SEQ ID NO: 1137

SEQ ID NO: 1206 - DNA, 275 bp, Homo sapiens
  misc_feature 10, 11, 13, 236, 237: n = A,T,C or G
ctgctctcgnngnctcactggatggaccagcacttccgcacgacgcccctggagaagaacgcccccgtcttgctggccctgctgggtatctggtacatcaactgctttgggtgtgagacacacgccatgctgccctatgaccagtacctgcaccgctttgctgcgtacttccagcagggcgacatggagtccaatgggaaatacatcaccaaatctggaacccgtgtggaccaccnnacaggccccattgtgtggggggagccagggaccaatgg

SEQ ID NO: 1207 - DNA, 182 bp, Homo sapiens
ccatctcctgctcgaagtccagggcgacgtagcacagcttctccttgatgtcgcgcacgatttcccgctcggccgtggtggtgaagctgtagcctcgctcagtgaggatcttcatgaggtagtcggtcaggtcccggccagccaggtccagacgcaggatggcgtgggggagggcgtagccc

SEQ ID NO: 1208 - DNA, 260 bp, Homo sapiens
  misc_feature 130, 154, 167, 176, 240: n = A,T,C or G
gctggttatgaactcctgacctcaagtgatctgccctcctcagcctcccaaagtgctgggattataggcatgagccactggaatttttctttttttttttctttctttttttttttttttttaaattganacaaggtctggctctatcgcccangctggagtgcagnggcaccatntcggctcactgcaacctctgcctgctgggctcgagccatcctcccacctcagcctcccaagtanttgggactagaggtatgcac

SEQ ID NO: 1209 - DNA, 487 bp, Homo sapiens
aaacccactccaccttactaccagacaaccttagccaaaccatttacccaaataaagtataggcgatagaaattgaaacctggcgcaatagatatagtaccgcaagggaaagatgaaaaactataaccaagcataatatagcaaggactaatccctataccttctgcataatgaattaactagaaataactttgcaaggagagccaaagctaagacccccgaaaccagacgagctacctaagaacagctaaaagagcacacccgtctatgtagcaaaatagtgggaagatttataggtagaggcgacaaacctaccgagcctggtgatagctggttgtccaagatagaatcttagttcaactttaaatttgcccacagaaccctctaaatccccttgtaaatttaactgttagtccaaagaggaacagctctttggacactaggaaaaaaccttgtagagagagtaaaaaatttaacacccatagta

SEQ ID NO: 1210 - DNA, 216 bp, Homo sapiens
ccactcagctcagcgggcgacgtgcccctacaagttggcagaagtggctgccactgctgggtttgtgtaagagaggctgctgccaccattacctgcagaaaccttctcataggggctacgatcggtactgctagggggcacatagcgcccatggatgtggtaggtggggtactcgctcataggatggtaggtatcccgggctggaaagatgtccag

SEQ ID NO: 1211 - DNA, 443 bp, Homo sapiens
ccaaggtcagaggctgatgcaacaggccctcttctccccagggccaggctcctgtccagcctgggcactgcccagagtgatggcattggtccggatgctgttctgtctctgcttggacaccttcgcaaagatttctttcaggacagtctcaaaggctagctcaacattggtagagtccagggctgaggtctccaggaagagcagtccattgttttcagcgaacattcgggcctcctcagtgggcacttcccgggcctggctgaggtcacttttgttacccacgagcatgacgacgatcgtggcttcagcatggtcatagagctccttcagccatcgctccaccacagcataggtctggtgcttggttaggtcaaacaccaggagggcccccactgcaccacgatagtacgccgaggtgatggctcggtaccgctccaggccag

SEQ ID NO: 1212 - DNA, 526 bp, Homo sapiens
actgaaacccgagtaaatgctcaggctgctgcatatgaatacatggctgcatacatagaaaatgcgaaacaggttggccgccttgaaaatgcaatcgggtggtatcatagccaccctggctatggctgctggctttctgggattgatgttagtactcagatgctcaatcagcagttccaggaaccatttgtagcagtggtgattgatccaacaagaacaatatccgcagggaaagtgaatcttggcgcctttaggacatacccaaagggctacaaacctcctgatgaaggaccttctgagtaccagactattccacttaataaaatagaagattttggtgtacactgcaaacaatattatgccttagaagtctcatatttcaaatcctctttggatcgcaaattgcttgagctgttgtggaataaatactgggtgaatacgttgagttcttctagcttgcttactaatgcagactataccactggtcaggtctttgatttgtctgaaaagttagagcagtcagaag

SEQ ID NO: 1213 - DNA, 359 bp, Homo sapiens
  misc_feature 15, 255, 258, 321, 322, 357: n = A,T,C or G
ccagccattgcctgncatttggtagtatagtatgattctcaccattatttgtcatggaggcagacatacaccagaaatgggggagaaacagtacatatctttctgtctttagtttattgtgtgctggtctaagcaagctgagatcatttgcaatggaaaacacgtaacttgtttaaaagtttttctggtagctttagctttatgctaaaaaaaataatgacattgggtatctatttctttctaagactacattantangaaaataagtcttttcatgcttatgatttagctgttttgtggtaattgctttttaaaggaagnnattaatatcataagttattattaatattgtgaacnca

SEQ ID NO: 1214 - DNA, 428 bp, Homo sapiens
ccaagcttgaggcagccctaggtgaggccaagaagcaacttcaggatgagatgctgcggcgggtggatgctgagaacaggctgcagaccatgaaggaggaactggacttccagaagaacatctacagtgaggagctgcgtgagaccaagcgccgtcatgagacccgactggtggagattgacaatgggaagcagcgtgagtttgagagccggctggcggatgcgctgcaggaactgcgggcccagcatgaggaccaggtggagcagtataagaaggagctggagaagacttattctgccaagctggacaatgccaggcagtctgctgagaggaacagcaacctggtgggggctgcccacgaggagctgcagcagtcgcgcatccgcatcgacagcctctctgcccagctcagccagctccagaagcag

SEQ ID NO: 1215 - DNA, 414 bp, Homo sapiens; identical to SEQ ID NO: 1005

SEQ ID NO: 1216 - DNA, 162 bp, Homo sapiens
  misc_feature 118, 119, 148: n = A,T,C or G
cctggccgcagggtcccccggtattgctgttgctacgaggttggggggcagcgattgtcctgtgggagccaccgttctcctgggtcggggaccctcacttcttctggggtgtgctcannttctgcatgccccggatcttgtccagcangccagaaatgaagg

SEQ ID NO: 1217 - DNA, 392 bp, Homo sapiens
  misc_feature 306: n = A,T,C or G
ctgaagtagaggctggaactgaagctgagactgaggctgaggctgaaactggagctaagggtgaggctggaactggagctgaggttgaggccagaactggagctaaagttgaggctggaaccggagctgaggttgaggctggaactggagttaaggttgctggaagtggagctgaggttgaggctggaactgaagctgaggttgaaggtggaagtggagccgaagctagaggtggaactgaggctgaagactgtgcttgctggatccctgtagcctgttttttggcaaatcttggaggaagcttanaagtctggcttcttcctttttcatttgcattctttttgttccagaccttaaaaaattaacggggaccatttttgtcaataatgcag

SEQ ID NO: 1218 - DNA, 526 bp, Homo sapiens
  misc_feature 379, 447, 470, 501: n = A,T,C or G
ctgagctttcagcagataaatcacagcagaaatagaatcaccctaggactttcaatcaaaagctggaagtccaccttacagaaagacaaaaagaaacccctttttatatcttaacaaagcaatagctctcaagcagcagagcatctcgaggaagaaagcttgcccggtcgccatcccatcatgccagagcgtgcagtgtccacccttgactacgctggggaattgctgattttttgaaaaagcttaacttaacaatttctgatgtctatcctttagagttctgtatgttcccattttttattcttctgaattttgaattgcaagtagctgtaaaatccaatctttgagtgcatgggggtgggtgtgaggcggggctcancttcaaccccctgtcctgtaaagcagtggctggtttttcctgagcccagccctgggaggtcgtggtangtgtggaggctgcagagctcctncagatgctgccctcgctgtgcctcacaccanagaggatggaagtgggctctggtgt

SEQ ID NO: 1219 - DNA, 382 bp, Homo sapiens
ctggccggcggtgcagatctggagtccagcctcagggatgcgctactttccattctctgcattgaacattcgttctgtcagcatccgctccagcttcactgcatcagcggcaaacttgcggatcccgtcagagagcttctccacagccatctggtcctcgttgtgcaaccaacggaaagacttctcatccaggtggattttttccaggtcactggcttgggccgccttggctgagagcacaggcaccagcttggcgttgtcctgcagcagctctcccaggagcttgggtgagatggtgaggaagtcacagccggccagtgctttgatctcgcccgtgttgcggaaggaggcgcccatgacaatggttttgtagctaaacttc

SEQ ID NO: 1220 - DNA, 127 bp, Homo sapiens
tcgacctccttgaagcagaccaagtatagcaagcctctaaaaggactactgagaaacagaatcagaaactctagaactctagttagggcccttcagcagggctgcagagcctccctggatacccagg

SEQ ID NO: 1221 - DNA, 304 bp, Homo sapiens
ccaccccggagatgacacgaggctcacatgactctagacacttggtggaaagtgaggcgagaaaaacaatgacttgggccaattacacgactgcaaagctagagctgccaacagggctccagggagcttggcttctgtagaagttctaaggaagcggtacgaactccacggcggtggggcgctaactagcagggacccctgcaagtgttggtcgggggcctcgggctgcctgagctgacacgaggggaggggtctgtgtagccaacaggtgaccgaagggcttgcctgcccacagcttacttgg

SEQ ID NO: 1222 - DNA, 309 bp, Homo sapiens
ctgtcgcactcgtagctgcaactcactcaacttgtctttagcagcaatttctgcatagtcattggcatgttcacctacctggatgtccgggtgaactctcagcatgcctccagcaaagagggagaacttggtggaattggagtgaagacagatctggtgctcaccaggggtatgggaagtgaaagtgaacctgccctcggagccatactgccgggccaggatgaccttgtcctctgggtcctccacctccacaaacatgccaagccccggggtggccggctggtactcctcccgctgcttgtcatacag

SEQ ID NO: 1223 - DNA, 390 bp, Homo sapiens
cctggcctgggagccctgtgcctactagaagcacattagattatccattcactgacagaacaggtcttttttgggtccttcttctccaccacgatatacttgcagtcctccttcttgaagattctttggcagttgtctttgtcataacccacaggtgtagaaacaagggtgcaacatgaaatctctgtttcgtagcaagtgcatgtctcacagttgtcagtctgccactccgagtttattggtgtttgtttcctttgagatccatgcatttcctggttgaatctcctggaactccctcattaggtatgaaatagcatgatgcattgcataaagtcacgaaggtggcaaagatcacaacgctgcccaggagaacattcattgtgataagca

SEQ ID NO: 1224 - DNA, 407 bp, Homo sapiens
ccttatgactacaacggcccacgagaaaaatatggaatcgttgattacatgatcgagcagtccgggcctccctccaaggagattctgaccctgaagcaggtccaggagttcctgaaggatggagacgatgtcatcatcatcggggtctttaagggggagagtgacccagcctaccagcaataccaggatgccgctaacaacctgagagaagattacaaatttcaccacactttcagcacagaaatagcaaagttcttgaaagtctcccaggggcagttggttgtaatgcagcctgagaaattccagtccaagtatgagccccggagccacatgatggacgtccagggctccacccaggactcggccatcaaggacttcgtgctgaagtacgccctgcccctggttgg

SEQ ID NO: 1225 - DNA, 250 bp, Homo sapiens
ctgcagctttgggcatttttctttttaattattcttcctctgactttgtatcccttaatacctacactctccaattgtaagagaaagggggcagggaagcaatatagcttccattctaaggctgtattcccgttatgaattactagctgattacagttcagagcattgatcctggaatgtgtgctggagaaatttaaaatactggggttttttgtttaatggtgcctgtttagagttggaagttgaacag

SEQ ID NO: 1226 - DNA, 444 bp, Homo sapiens
  misc_feature 427: n = A,T,C or G
cctttaggctgttgctctgggcagggggtgggggtgcgggggcttacagtgggggcccttagttggcacaggttcggaagggccccaggcagacatgaattctcctgagacttgaggtaggttgcttcagccagcccgggcggagaagaagggcagagagcgaacataggagtccagtcgggagcgaaagagctcactttgcacagtttggcccagcgggcacaggggattcttcaccaccagctccacatacagcgcactgtagatgtggtgcagcacatctcggatgggtcccacgcccaagtcagtattcatgacaactttgatcccagtgggcgtctcgtagtaatggagtttgtaacggctagtttggaaggccaggaagccatccttcatgtctagcggggacatcttgctgacaaacgancggatagagaagagcat

SEQ ID NO: 1227 - DNA, 491 bp, Homo sapiens
gttagccttacatgttgtgtagacttactttaagtttgcacccttgaaatgtgtcatatcaatttctggattcataatagcaagattagcaaaggataaatgccgaaggtcacttcattctggacacagttggatcaatactgattaagtagaaaatccaagctttgcttgagaacttttgtaacgtggagagtaaaaagtatcggttttattctttgctgatgtcctttctgcttgaaataacagtcaccatacagctaaaggagaggagtttctttccttctaagtaggcagaaatggtatcattatgttgccgctctccaatctcccagagctcgctctctagagaatcaccttctttcgctttttttttttttttgaggtagagtctcactatgttgcccagactagccttgaactcctgggctcaagtgattctccctcctcagcctcccgagtagctggaacgaactatagttgcaccactgcag

SEQ ID NO: 1228 - DNA, 279 bp, Homo sapiens
ctgggcggatctgatcaactaggcaacatcatgtccggatatgagttcatcaacaagttgactggagaagatgtatttggaatcaccgttcctctaattacaagtacaactggagcaaagctgggaaagtctgctggcaatgctgtttggctaaacagagataagacatctccatttgaattgtatcaattctttgtcaggcaaccggacgattcagtggaaaggtacctgaagctgttcactttcctaccccttccagagattgatcatatcatgcag

SEQ ID NO: 1229 - DNA, 199 bp, Homo sapiens
cggccgaggtccagtccaacctgctcctcattattgtataaatgagcagaatcaatatggcggaagccagcttcaattgccaatttggtggcctctaaagctttacttttaggaacctctgcaggcgcataggtgccaaatcccaggacaggcatgaagtgaccatcattcagcttcacacactgatatttcgaatcca

SEQ ID NO: 1230 - DNA, 237 bp, Homo sapiens
  misc_feature 9, 12: n = A,T,C or G
ctgcattgntgnggaattcacaactactcaggctgggaaaatacagattggttcaaagaaaccaaaaaccagagtgtccctcttagctgctgcagagagactgccagcaattgtaatggcagcctggcccacccttccgacctctatgctgaggggtgtgaggctctagtagtgaagaagctacaagaaatcatgatgcatgtgatctgggccgcactggcatttgcagctattcag

SEQ ID NO: 1231 - DNA, 277 bp, Homo sapiens
ctggaggtgcctcagaaggtgcattctgcttcctgcaggggcttgaaacaccaaggcactccagggatcctggagtcaaagcagcagccccggttgttgcactccttgggggtgacatgggggtagccgcagtccaccctgtccttggctggcacggcacactggtttgcagacaggcccacgtactcctcagcagagctggaggacagcaaggccaggaccagccccagcatgcagagcgctctggcagccatgaccaccgtgggctccgggacgc

SEQ ID NO: 1232 - DNA, 348 bp, Homo sapiens
ctgcaactttttttttttgcaattacagagtggtattcagttaacagaacaacaattatttcgtataagctgcatcagagacaactgaagatgaaaaaactaccatccccatatataactaatttgtgctgtgcaccaacaagaacctgctttaaatttccatgccaatttacaacccccatactgtaccaggcaaggttagtggctattgaaaataccaccaggacagggctatctaaagacacattcggtagtgtgttaactatacaaaaaaagacactgtacagtttaaaaacaaatcttacacagccttacatttcaatttttttctttaaaaggagtgagttg

SEQ ID NO: 1233 - DNA, 312 bp, Homo sapiens
  misc_feature 160, 163, 241, 302: n = A,T,C or G
ctgagcgtacggccgcgttcatcccagccgcgggtgcccccacgttgatgacagctacgttgcaattggtctttgggatctgatcatccggcagcttgatggcaagtcgcttgtaggtgttcaggttgcccgcaaagctcctccctcggagtcgaaccgnatnttgaaatctcctctcgtccatcgccttctgcacatcctgagtcatctgcacgcactccatcagcggcaggcgcacggngtggttcccgttcagtgacacgacgcaagctggggtgtccggggtggcctctagcaaggcnatgactgcct

SEQ ID NO: 1234 - DNA, 151 bp, Homo sapiens
ccggccgcgggcataaaaggcgccaggtgagggcctcgccgctcctcccgcgaatcgcagcttctgagaccagggttgctccgtccgtgctccgcctcgccatgacttcctacagctatcgccagtcgtcggccacgtcgtccttcggagg

SEQ ID NO: 1235 - DNA, 250 bp, Homo sapiens
  misc_feature 10, 15, 17, 107, 161, 189: n = A,T,C or G
ctgcaccttngggcntntttctttttaattattcttcctctgactttgtatcccttaatacctacactctccaattgtaagagaaagggggcagggaagcaatatancttccattctaaggctgtattcccgttatgaattactagctgattacagttcanagcattgatcctggaatgtgtgctgganaaatttaaaatactggggttttttgtttaatggtgcctgtttagagttggaagttgaacag

SEQ ID NO: 1236 - DNA, 154 bp, Homo sapiens
ctgatcctcactattgtgggcaccatcgctggcatcgtcattctcagcatgataattgcattgattgtcacagcaagatcaaataacaaaacgaagcatattgaagaagagaacttgattgacgaagactttcaaaatctaaaactgcggtcga

SEQ ID NO: 1237 - DNA, 375 bp, Homo sapiens
ccactggatctttgggattaaagctctgttggatttgtacctcagaggaagatcaagtggctgatcctttggactctgtaaagagcattcttctagtcagagggtggaatggcagcagcaactggaagaaaatgagttttttggtgcccacacccaagagcacacacatgctgcactgtctcggaaagcagggccagctagagccaccatgttcttccttacctcagtttacctgcggcctgcgctgcactgcagatgcccaccctgccctgggtctggccggcggaagctctgtccaaggtccacacacctccaggtttacgccaacatccttgtgccctccccaccttctcttccaacgcattaggtgcattg

SEQ ID NO: 1238 - DNA, 454 bp, Homo sapiens
gtcaagatcaagttcaatatcatcgcctctctctatgactacaaccccaacctggcaacctacatgaagccagagatgtgggggaagtgcctggactgcatcaatgagctgatggatatcctgtttgcaaatcccaacatttttgttggagagaatattccggaagagagtgagaacctgcacaacgctgaccagccactgcgtgtccgtggctgcatcctaactctggtggaacgaatggatgaagaatttaccaaaataatgcaaaatactgaccctcactccaagagtacgtggagcacttgaaggatgaggcccaggtgtgtgccatcatcgagcgtgtgcagcgctacctggaggagaagggcactaccgaggaggtctgccgcatctacctgctgcgcatcctgcacacctactacaagtttgattacaaggcccatcagcgacagac

SEQ ID NO: 1239 - DNA, 483 bp, Homo sapiens
ctgccaggctgaaaagaagcctcagctcccacaccgccctcctcaccgcccttcctcgggagtcacttccactggtggaccacgggcccccagccctgtgtcggccttgtctgtctcagctcaaccacagtctgacaccagagcccacttccatcctctctggtgtgaggcacagcgagggcagcatctggaggagctctgcagcctccacacctaccacgacctcccagggctgggctcaggaaaaaccagccactgctttacaggacagggggttgaagctgagccccgcctcacacccacccccatgcactcaaagattggattttacagctacttgcaattcaaaattcagaagaataaaaaatgggaacatacagaactctaaaagatagacatcagaaattgttaagttaagctttttcaaaaaatcagcaattccccagcgtagtcaagggtggacactgcacgctctggcatgat

SEQ ID NO: 1240 - DNA, 358 bp, Homo sapiens
cctttatggatgaaagtacccagtgcttccagaaggtgtcagtacagctcggaaagagaagcatgcaacaattagatccctcaccagctcgaaaactgttgaagcttcagctacagaacccacctgccatacatggatctggatctggatcttgtcagtgactttatgagagtttctgccacaaggtgcccaagaggagaggaatgggaagagtgccccagcacgtggtgactgcgtgatttctgctcratgcctttmtsatamstgaccacactgasggcgaattmcagcacactggcggccgttactagtggatccgagctcggtaccaagcttggcgtaatcatggtcatagctg

SEQ ID NO: 1241 - DNA, 194 bp, Homo sapiens
ccaaaggttcgtaatgccatctctgcaccaatctcctcccccatagcaataagggcaatccccagaacagccactccctgatgtgctcccatgtcagcaggggcttccttcttgtccttgtctttcttttccttcttgtctttgtcttcctccttctctttggagtcaaagtgttcgctacaaatgtggagcag

SEQ ID NO: 1242 - DNA, 316 bp, Homo sapiens
ccttgttctcactgccctctaagggaacttggtcactcggcacttttaagcctcagtttctccagttcaataataaggacaagagcttttcccatgcattctctttccccgggaaagttgactgaggtgaccagtaatagaattgaaaagggagagtgtcttcagtgcaatgtggcatcctggattgggtcttggaacaaaaacaggacattagtgggaaaattggaaatctgaaaaaagtctgaattttagttaatataccaatttcagtctcttggttttgacagatgtaccatggtgatgtaagatgttgacc

SEQ ID NO: 1243 - DNA, 275 bp, Homo sapiens
aaaagggtgatgaaagtattatgtataatattataatggtaaatatgtgatatgaatttgttgaaatcaacagaatatacagcataaagggttaattccaattcacaaaaatataaataaataggagattaggaattccaggatagaatgcagacaatatagaaaatatctaatgtcattacaaatgtatgaaatcagaagaggtgccaagtgacctcagaaatagtgtagtcaataaaagaataaagaaagtgcacgtcagaactgtaccccag

SEQ ID NO: 1244 - DNA, 235 bp, Homo sapiens
ctgctgcgcttggataacaagtaattcaacgcacgcacttaacagaaatgttaaactataacaagcaccatttgaggattaacaggaacatttttttgaagatttcaaacgaactcgactttcagtataattgtacctaaagtatttataaacagctcatcggagcctctatttgtcatagacttttgagttgattgttgggaccacataataggaccattttttttttgtcttt

SEQ ID NO: 1245 - DNA, 640 bp, Homo sapiens
  misc_feature 565: n = A,T,C or G
ctgatgatgttccacaaaagagcaaaacatacacaatctggttccactctacagaaatcctggaactggactacaaagggaatagacagggtgtggcaggagggggttcctcacggttggagtgcgaggttagggacaggaatagaaggyaggtaataaacattcatgtggtattaacagggcagatgtgtcaatrtatttscaagtttagcataatataggtataaaaattaaataaaaatagtttakatgtgtgtgtatatatgggttaatacacaacacatacctcctagagtcattacctgagaggttctacaagaaaagacagcaaattaacaaaaaatacacccagaatcaagatttgagttttggttcctttcatagcagaatggtatgcaacatttcttggaaaaatggctaatcctagggcttggaaagagaatataggagtaaagtctacaatttctcatggtacccagaaaataagaaagggttccaaaatgaagaatcgctccttttgcaaaccttatggtaacaaatataatatttataaaaagtgaattangtaatatgttaatggagaaataaacatcattatgaaatgctatcttaacaaaaaatargagaaaatwttagtttt

SEQ ID NO: 1246 - DNA, 509 bp, Homo sapiens
aaactttcaaagaatcacttttaggcttacaaaaataaatatttgtcaaaatgttcaataaatattacataaaactagcagcaaaaagtatctagaaatctgtcgtgtgcaaatagttttcttcccaactatcattcccatggtcccaaataaattttagaatctagtcccatccccttcctagacaagctgcgttcaacaatctccaagagacaaagtaagattggaagtttaaggacacgcacacaagacatatatataaaattctctgaatgtgcaataaaagaagtactttgtaaaaagttatgggcaaaatgtacaagggcctaaacctagactaattgaaatagcaccataacaaatgacctcaatactgtcaagtgcacctacttaataaaagttttagaacaaggcacaatacacttgaaaatctattgcactttaggaaatttttgccgtcttcctatgccactgtaaaaagatggagcgttttgatcaccgcattctgg

SEQ ID NO: 1247 - DNA, 310 bp, Homo sapiens
catatgtggaactattcttggaaagtctacaaagtgaaatctatcgagttatttctcatttgcaaagtgatcctttgagtcatttctcataatctataatctgaatgttaatactgatatttttaaaagccctacatcccaacagaccaggccatctagatatttcagcgtggtgtctcaggatgagtaaacaaacagctaaaaatatatgacttatgtaaactagagttacaggagttactagcttttctgaaagggatatattctaagtattttttcttaaaaaaaaaaaaargggggggggggggtt

SEQ ID NO: 1248 - DNA, 640 bp, Homo sapiens
  misc_feature 604: n = A,T,C or G
aaagatataaaactatggagaaaactgctaaagggtatccctgacctttatgatgatgcagctattttcgaggccaaaaaatcattttactgggcaagaaaaacatctcattcctttgtcgtgaatatccttgctcaggctctttatgaattattttctgccacagatgattccctgcatcaactaagaaaagcctgttttctttatttcaaacttggtggcgaatgtgttgcgggtcctgttgggctgctttctgtattgtctcctaaccctctagttttaattggacacttctttgctgttgcaatctatgccgtgtatttttgctttaagtcagaaccttggattacaaaacctcgagcccttctcagtagtggtgctgtattgtacaaagcgtgttctgtaatatttcctctaatttactcagaaatgaagtatatggttcattaagcttaaaggggaaccatttgtgaatgaatatttggaacttaccaagtcctaagagacttttggaagaggatatatatagcatagtaccataccacttataaagtggaaactcttggaccaagatttggattaatttgtttttgaagtttttggnatataaatatgtaaatacatgctttaattgcaattt

SEQ ID NO: 1249 - DNA, 1108 bp, Homo sapiens
  misc_feature 527: n = A,T,C or G
caaaataaatttcaattcaatgaaaagtaaataacttagggatctataaatgacactgcaatgtatcttgttccatttttaacaggaagtccttcatgcaaatgtgtgagtctcccaggatgcatgaagctccagccttttcgtggtgactcaatagagcaattgtaccttacaaatktgcaaccacctccctgaaagtcttctcccacgttattaagtgcaatgyttatggtaaatgtagaagcatcatgatgaggacgaagagaacgctgtcgttcaggggagtattttactacaaaattcagtagtgcaaatcccttcgtataatagcctgcaaagaccttcagtgtaactggtgcaatgaactcccggataaaatgaagccatacattctccagatcaacttgcttcatgtggatatcatcagttgggacattttcataaccaccagatatacggctatcatgatgtttttccccagaccatttgccgtaatgttccatttcttctaccaattcatcacaggnctttttcagaaaatatggggaaccmaaaagacatctggacagggctgttcaamctatattttcagtgaaaatctttgaataatccmcggtttatatacttttccttccagtccacaggattttcaaaaatctgccagaggtcattgttataatgggaagtattgtaattagcagtggataatagccttccaaattcatgtctattagaaatgtacataaatacaccctttggggggctgagcatttggaatgtttccggagtaggggagtctttttccctttgtaaagtcatttctctagcatttcggcaaagagccatatcaggatccagtttatcacgaacaaaatagctcctttcattcatctctgatcggagtgtctttcctttaattaagtacacattagccatatatgggacattccatactcctactctattcccttgaacaatatccacataatcttcagatcgtgcatagtatccatcaggactcaatgctccccagaaattggaccacagctttccatgacgagttacaagaggagcaatgatctttctgttttgttcaatcaaaattttt

SEQ ID NO: 1250 - DNA, 567 bp, Homo sapiens
ctgaatattgaactggaagcagcacatcattaggctttatgactgggtgtgtgttgtgtgtatgtaatacataatgtttattgtacagatgtgtggggtttgtgttttatgatacattacagccaaattatttgttggtttatggacatactgccctttcattttttttcttttccagtgtttaggtgatctcaaattaggaaatgcatttaaccatgtaaaagatgagtgctaaagtaagctttttagggccctttgccaataggtagtcattcaatctggtattgatcttttcacaaataacagaactgagaaacttttatatataactgatgatcacataaaacagatttgcataaaattaccatgattgctttatgtttatatttaacttgtatttttgtacaaacaagattgtgtaagatatatttgaagtttcagtgatttaacagtctttccaacttttcatgatttttatgagcacagactttcaagaaaatacttgaaaataaattacattgccttttgtccattaatcagcaaataaaacatggccttaactaaaaa

SEQ ID NO: 1251 - DNA, 655 bp, Homo sapiens
  misc_feature 161, 175, 193, 200, 211, 212, 223, 228, 324, 396, 518, 546,559, 565, 571, 584, 597, 601, 610, 613, 622, 639: n = A,T,C or G
gaaagaaaccaatttaatgccaccaaacataagcctgctatacctgggaaacaaaaaatctcacacctaaattctagcagagtaaacgattccaactagaatgtactgtatatccatatggcacatttatgactttgtaatatgtaattcataatacaggnttaaggtgtgtggnatggagctaggaaaaccnaaggagnaggaaattatnnaaaagaactgnaggtnaagtataaagtcatatgcctgatttcctcaaaccttttggttttcctcatggcttctggctttatatttttatcacaaaccaagatctaacagggntctttctagaggattattagataagtaacacttgatcattaagcacggatcatgccactcattcatgggtgntctatgttccatgaactctaatagcccaacttatacatggcactccaaggggatgcttcagccagaaagtaaagggctgaaaaagtagaacaatacaaaagccctcgtgtggggggaactgngggctcactcttacttggccttcattcnaaacaggttgggnctttcntgcgangatctctcagggnggtaaaaactttntggntttcaacanaanaggtttggntgaatgattactcggcngacacctaagggatcc

SEQ ID NO: 1252 - DNA, 672 bp, Homo sapiens
  misc_feature 4, 653: n = A,T,C or G
aaantgcaaaaacccagaagaccaataattctgaaacttggcatgagtgtgcccagtcagcagcttgcaaagagaggatgtgtcagttactacaattgctgtactcctttagctgagtccttcaactttctccttcttgccagtaaatactacgttgtaattcatatgactgagatcttagtatcacaggatttttagctcccatgcctccttcaaaattgtttacatggatttgtttctattctctgtaggccatattccaaacacattcacttctaaatccaacacaagtgaaggaccagccaggatgaaacacttcagcaatcattttgttaaaaataacatcctggtcatcaagctaagcataagcacctcttgtataacaattcatcttaaaagcttaaagtacaataataaaaataactgcctgaaaactggaaatgaaatacaacagaaaaactgaagcattagtaatttttgcaagtaacccaggtacagtacatttgatttcatagagggtgttttctgatgtttaaggagagggtagaaggggtaggaaaacttggcaaggaagatggaaacagcacaaccagttattttgcttttaataaagtaaatgtaatgacaggagtagggaggtgacaaacacatcnatatatatttttcttatgg

SEQ ID NO: 1253 - DNA, 644 bp, Homo sapiens
  misc_feature 578, 582: n = A,T,C or G
ccaaatatttgttagaaacttctggtaacttagatggtctggaatacaagttacatgattttggctacagaggagtctcttcccaagagactgctggcataggagcatctgctcacttggttaacttcaaaggaacagatacagtagcaggacttgctctaattaaaaaatattatggaacgaaagatcctgttccaggctattctgttccagcagcagaacacagtaccataacagcttgggggaaagaccatgaaaaagatgcttttgaacatattgtaacacagttttcatcagtgcctgtatctgtggtcagcgatagctatgacatttataatgcgtgtgagaaatatggggtgaagatctaagacatttaatagtatcgagaagtacacagacaccactaataatcagacctgattctggaaaccctcttgacactgtgttaaaggttttggagattttaggtaagaagtttcctgttactgagaactcaaagggttacaagttgctgcccaccttatcttagagttattcaaggggatggagtagatattaataccttacaaagagattgnaganggcatgaaacaaaaaatgyggactattgaaaatattgccttcgttctggcggaggtttgctc

SEQ ID NO: 1254 - DNA, 438 bp, Homo sapiens
aaagggcatttgaggggaggattattgctatgaatgaaaaaaatattttagcttagactaagctacctgccttcaaaatagtttagggaccaccaccatattttattttgtttttatttttgaacatttttctaatgatttggagagaaaactatttacaaaaattccacatatcagtgatacaatttcttgctgtcaccaattttttataatagcagagtggcctgttctaagaaggccatattttttaagttatctttcagggtaacatggaaatactataaagttggatgtcaaactttaatatgttttcagtgttctctaattttttggaatttttgtagactttacacctggaaaaaaagatttgtaaaatcaccggaacaattgtgtgctttattttataggtagtggttattagtattacatccccatttt

SEQ ID NO: 1255 - DNA, 519 bp, Homo sapiens
caagcacaggggagtttatagttctgatgtctttgacattttccctggaacataccaaaccctagaaatgtttccaagaacacctggaatttggttactccactgccatgtgaccgaccacattcatgctggaatggaaaccacttacaccgttctacaaaatgaagcatcttctgagactcacaggagaatatggaatgtgatctacccaatcacagtcagtgtgattattttattccaaatatctaccaaggaatgaccaggagaataagatcctccgatgttcgcaatggtgtggtgtcaggaggctgcctcttagacaatctccagatgtactgtgatgtgagtttgaaaaagagttcctgaagtaccacatctgggagacatgccactagctgagcttcccaaaagtctaccaagagctgaggaattgtatcttcatccttagcacaaagcaccttaaaaacagtaaaaggagcctctatattccagataaatatagcactgataaagcgacag

SEQ ID NO: 1256 - DNA, 178 bp, Homo sapiens
ccatgcaggagttcatgatcctcccagtcggtgcagcaaacttcagggaagccatgcgcattggagcagaggtttaccacaacctgaagaatgtcatcaaggagaaatatgggaaagatgccaccaatgtgggggatgaaggcgggtttgctcccaacatcctggagaataaagaagg

SEQ ID NO: 1257 - DNA, 255 bp, Homo sapiens
gggtccacttgctgccccatcattgtatcaccttccttcaatcttttggctgccactctcatgtagggatccacggtgaggaacaaagcttcaagcaggacctctccattttttaagggtgggagctcagatgtcttcaactcaaagtcactattagtaggatagccaacaaagtgcttcttcagggtccatgtcttagtacgaaccatcctgaagctcaggagcccgaaggttccactgcctggggaaggcggc

SEQ ID NO: 1258 - DNA, 630 bp, Homo sapiens
aaaactaaaagcatcactgctgaactccagctcagtcttcccattttataatgaggactctgaagtttatagaggtcaaggacttgtccaaagctttagatatgtagtgtctgtgcccttttcctctaagtttctcctagagaatgtgggggctcaggaacagagaaaataaggtgcaaaaagtagaaatgggtggtgtttctcaaagtgtggtccatctgcatcctagtgactggggtgcttgttaaaatgcagattgctgggccttatcccaatctgaccaaatcatctcaggatctaccttttgaacaaacttgcctaggtcaaattcactcttgtggaagtttaagtacttcagaaacaagacagccacagaaggtgcacctgctaatttggtggcttccagtgcctcatctgtaacttctggtgaaatcctgagatgtcttactttacattgtttacatcccataacattccaacatttagaaattcactcgagcttatttttcttacttgtttagcactaaatgaaaatagctccctgaagttaaggagtttatatacagtaattcatgcaagtgtgtaaattaaacagatgactttcccccctaatatctaatgcacagcaag

SEQ ID NO: 1259 - DNA, 159 bp, Homo sapiens; identical to SEQ ID NO: 235

SEQ ID NO: 1260 - DNA, 115 bp, Homo sapiens
aaaaatactataatttcaaaacttccaaatttcaacagatgccagtgttctctccttttttcatatgggaaaatttctttcaaaattatttgacgcttggacaaaaattccacag

SEQ ID NO: 1261 - DNA, 280 bp, Homo sapiens
aaaatattgtttatctttatttattttgtggtaatatagtaagtttttttagaagacaattttcataacttgataaattatagttttgtttgttagaaaagttgctcttaaaagatgtaaatagatgacaaacgatgtaaataattttgtaagaggcctcaaaatgtttatacgtggaaacacacctacatgaaaagcagaaatcggttgctgttttgcttctttttccctcttatttttgtattgtggtcatttcctatgcaaataatggagcaaacag

SEQ ID NO: 1262 - DNA, 144 bp, Homo sapiens
aaattatttgatgagttccacttgtatcatggcctacccgaggagaagaggagtttgttaactgggcctatgtagtagcctcatttaccatcgwttgtattactgaccacatatgcttgtcactgggaaagaagcctgtttcag

SEQ ID NO: 1263 - DNA, 487 bp, Homo sapiens
aaacatcttgataatttgttgttgagagctgttcattctaaaatgtaatgaaattcagtctagttctgctgataaagatcatcagttttgaaaggttactgattttcctcttccctcttagttttttacccaatatatggagaagagtaatggtcaatcttaacattttgttttaattgtttaataaagctgctgggcagtggtgcagcattcctacctagtgtcataaaagcaaaatacttacatagctttcttaaaatataggaatgacattacatttttaggagaaagtaagttgctttgcaccgcctacttaattcttttccatatattgtgatacaaacttttgaatatggaatcttactatttgaatagaaatgtgtatgtataatatacatacatacataagcatatatgtgtgtgtgtgtgtgtatatatatatatatgcatgctgtgaaacttgactacacaacataaatcacttttt

SEQ ID NO: 1264 - DNA, 250 bp, Homo sapiens
ctgcttcaacagagtggcagcaaccaagctggagtccaagccccctgataaaaggcagccaatccttctgtctgtcatcaaacgtttctttacagcattattaaaaaggatcctgaggttgttcttcacagtttctatctcaaaacctggaaagagtttctccacattgtcatagagggcgtgcaggggttcatcccgacagtgatgatatttaaccatttccacggatgcaactttgccatttggcttt

SEQ ID NO: 1265 - DNA, 394 bp, Homo sapiens
aaatatttgttccaacctttttcgttggtggcatttatggctttggagcactgtcaggcccatgttcattaccgtgagctcctgtgcatctcctaatttccaaactagcctggaaaacgcctccattgaccatgattggttcatggtcctgtgcatggaacatcatatgttcagggagataaagaactctgatagtggcacctgggtaaaaagtacaatccattatatctggatatcaagatcttttgcagttgaagagaggtattgccacagagaaaattataggagcagaagaaagtcaatgaaagtcaatgatgacactccattaggaaccagaaagatggtatttatttatacatataataggtgtaagagattagaggaagcctgtcac

SEQ ID NO: 1266 - DNA, 229 bp, Homo sapiens
ccacagttgtatcatatagcatctctaacatttcatctaggattatctagtatagatcttactatatttggggctatgttgtatacaatgttaacaagaacatatcttctctgcatatatgtgtgaattataaagaaaagcatgagaatgactctaagttcaacaaacatgggtgaatctctatgtgctcccagtgtcctggatgggctccccagcaagccattcctcc

SEQ ID NO: 1267 - DNA, 722 bp, Homo sapiens
  misc_feature 658: n = A,T,C or G
aaatcttatcaactttccaaattttcatactaaaatatattattgtattaatacaaactacagtattatacactacactgtgtaataaataaagaaatataaaaataagacacataaatataaaagttttctaaaactaaaagtacatatgtcagtaagaagggtattaatactgccaggtttgaagacatacagtacaaaaatgttgcacagatctataaactaaaagaaataaaataatactgataggtaaaaatcagctaatgttgttaataaattgggtccataataactaacatttggaaacagttatgagccaaataacaatagcatgtccatgtctgaaatgcaagtacatggataaagcagattagaaaatttccctttcgtttctgtagagaaattctgaaaatcaatcaacataaaatcaataccgaggaattgaaggatgaaatgtcccagtgtttcagtttctctgacagagtcagtggttttaagttttatttgggaattttgatacaagagacaaatcaacaaatgctagttattgtaggccacacattggatgaaggcgggttagagccttgaaaatactgagaaatggcacttacagcacacaggtcttgcttaagggcaaaggagatacaaagcttcatgncatatccttcatatggtaccacatattcaaacaccatcccaacactgatctgatgattttgctg

SEQ ID NO: 1268 - DNA, 407 bp, Homo sapiens
gatgacacaagcagctaataaccatttctgggtttctgcctaaccccctaattgtctgttaaagccaattctctgggtgtcccagtgagtggtggctttttttctttccacattggcacattcacttctcccactcttggcatgtaagaaataagcatttacataattggaaaaatctggatttctgatgccaaagggttaaagcttcttggatttcatttcattgatatacagccactattttatttttgatcagtggcctttgggccactgttcagggtactgaccatcagtgtcagcattagggttttggtttttgtttcttttgggtatttcttttttggcacatgtgaatcttgttttgtgtaaaatgaaattactttctcttgttctctgatgatgggttt

SEQ ID NO: 1269 - DNA, 675 bp, Homo sapiens
  misc_feature 613, 629, 643: n = A,T,C or G
ctgaaaaagagtgatcctcaatatcctaactaactggtcctcaactcaagcagagtttcttcactctggcactgtgatcatgaaacttagtagaggggattgtgtgtattttatacaaatttaatacaatgtcttacattgataaaattcttaaagagcaaaactgcattttatttctgcatccacattccaatcatattagaactaagatatttatctatgaagatataaatggtgcagagagactttcatctgtggattgcgttgtttcttagggttcctagcactgatgcctgcacaagcatgtgatatgtgaaataaaatggattcttctatagctaaatgagttccctctggggagagttctggtactgcaatcacaatgccagatggtgtttatgggctatttgtgtaagtaagtggtaagatgctatgaagtaagtgtgtttgttttcatcttatggaaactcttgatgcatgtgcttttgtatggaataaattttggtgcaatatgatgtcattcaactttgcattgaattgaaattttgggtggatttatatgtattataccctgtcacgcttctagttgcttcaaccatttataccattttgnacatatttttacttgnaaatatttacctgncccggccggccgtcgaaagggcgaaattcaac

SEQ ID NO: 1270 - DNA, 268 bp, Homo sapiens
ccatcctgggcggagctaaagttgcagacaagatccagctcatcaataatatgctggacaaagtcaatgagatgattattggtggtggaatggcttttaccttccttaaggtgctcaacaacatggagattggcacttctctgtttgatgaagagggagccaagattgtcaaagacctaatgtccaaagctgagaagaatggtgtgaagattaccttgcctgttgactttgtcactgctgacaagtttgatgagaatgccaagactgg

SEQ ID NO: 1271 - DNA, 307 bp, Homo sapiens
cctactcttctccgtccattgtactatctgcccgtggtggggatggcagtaggatcatatttgatgacttccgagaagcatattattggcttcgtcataatactccagaggatgcgaaggtcatgtcctggtgggattatggctatcagattacagctatggcaaaccgaacaattttagtggacaataacacatggaataatacccatatttctcgagtagggcaggcaatggcgtccacagaggaaaaagcctatgagatcatgagggagctcgatgtcagctatgtgctggtcatttttggagg

SEQ ID NO: 1272 - DNA, 798 bp, Homo sapiens
  misc_feature 613, 619, 703, 726, 773: n = A,T,C or G
ccattgctagaaattgaatcacaaataatagctaataatttttcatttttcaaaaaagatcatttggatagcagctatgtataaaatggaaaataaaaaattattctattttgcatgaatagttcagactttcccataccacagccaagcagtaactaaaattaggatcttaattttcaatgataaaaggtctaaggttcatttaattatgctcctttaacactgtctttctagatttttcacccagtattttcaaaatttgggaatgtaaacaattgatatatttattgtatgttggctagcagttcatccttctgcaaaatatgcattcagagaaatgtgaagcttgttttaatgaagacttaaaccatttgtgtcatttgtgttttcatattcaaatacaccaaattaaaattctgaacctatatttttcatcattaacttcctaatataccagaacatatacctttttcatgtaaagttggcaatgggatatggcagttttatttttgaaaaatatgtaacatgactttaatatttttatagttttcagaattagaaacataggaagggaaaatgttttaattagataagtcaactttttatgggctgnagtggngactataatagcaaattataaagcattattaaatggttataataattttaatattacctcattatgaattaactaaaataaagnggagtgatatttttaatgggtgntcatactggagctcctgagatatatgatttgctattgactcactggntgattgaataatatattactcgcgg

SEQ ID NO: 1273 - DNA, 664 bp, Homo sapiens
  misc_feature 623: n = A,T,C or G
aaaatataccttttcacaggtagcaagaaatagtacatgtaataagtctttatgactggaatgatccagaaatatcacaaagcatgagtaaacacatatataaaagtagctcatcatttccaaaagttaacctttagcctttgtgtaaaataaatggtgccaacaatctttataatgtagcaagctttccctgtttaatatccaaaaaatggagggtggggaggttgaagaaaaataagaaaagttagcaaataagatagtgaaaagaccaatgcagagaaaagtttatgtaatcaaatcttgctttgtctccacattatcacattttaagtggataaatttatgtaaacagaaaaagatgtccacaaaaccatatctatagatgtcatttggaagcatcaagaaattgataagtatgtggtgaattaaaattacttttataatgttttgctttcattaatgtttgttattgcaaaaatgtaagatttcctacaattttgtcttcaaatcccaatctagcccttcaaacttttatccaggttctccagaatatttggagtctttgttatcaaagcacaaggaaagctggcattcattatcagacttcgctgctttacaatganttcaaatcatttcatgatacaaataaagtgcctctgactgg

SEQ ID NO: 1274 - DNA, 153 bp, Homo sapiens; identical to SEQ ID NO: 239

SEQ ID NO: 1275 - DNA, 504 bp, Homo sapiens
aaaattctgataaaaatttactcaattacattttatacattaatatttagtgaatttgtccaaaaaggctatgtttaatttatgtgtaaaaataacaaaagatgtatcagtcagtctctgggcaataagaaaggaagaaagccttgctagaaataataaataatctcacgcaaaaggccaggtgacataagaatactacaataatcaatatgttttctttgtatttacaataaaatccatctgttaacactgtgatagaaaaaataatcagtccacatcatgtaataaaaacaggctttgaggatgattatacctcttataataaaaacatacaaggatttctcacagctaaagtacttttcaactttgacaactaatgacagtcatgggtgaaggtaaaactgacagagtactttagatcagctatgtcctacagtcaaggaatcaagggcattacccatttaccaagcagcaaaaagcactttcatttttccagaactattt

SEQ ID NO: 1276 - DNA, 533 bp, Homo sapiens
gacaatgatgtcactgtttggagcccccagggcaggattcatcaaattgaatatgcaatggaagctgttaaacaaggttcagccacagttggtctgaaatcaaaaactcatgcagttttggttgcattgaaaagggcgcaatcagagcttgcagctcatcagaaaaaaattctccatgttgacaaccatattggtatctcaattgcggggcttactgctgatgctagactgttatgtaattttatgcgtcaggagtgtttggattccagatttgtattcgatagaccactgcctgtgtctcgtcttgtatctctaattggaagcaagacccagataccaacacaacgatatggccggagaccatatggtgttggtctccttattgctggttatgatgatatgggccctcacattttccaaacctgtccatctgctaactattttgactgcagagccatgtccattggagcccgttcccaatcagctcgtacttacttggagagacatatgtctgaatttatggagtgtaattt

SEQ ID NO: 1277 - DNA, 78 bp, Homo sapiens
ccacaggaagttgcaaaaattagatggactctgtgtagctagccactcttgagtgtcaggtctgcatatgtgagtttt

SEQ ID NO: 1278 - DNA, 560 bp, Homo sapiens
aaatatctaaaacaatggcccactgaagaaaggaacaattaactctttaattaattccttaggataagtacccagaaatttaacagctagggcagacttctaatacaataccgaaagtccttccaaaaaccaagtggttgccaacttatgtcccttagcattataacattcttgagccaatagtgtaaaaatacgctgacaattttataggcaaacattactcaaggtatcttactttccacttattactaaagtaattaacccctaaatagatgctcctcaacagtgggactacatcctggtaaacctatcataagttgaaactatcaagttgaaatgcatttagtacccggataaacctatcataaagttgaaaatttgtaaattgaaccagtgtaaatcagaggccatcttacttcatactcatgaagcaactatagtgggatatttttcaacttacgagatagcctaggcttgttgaaacactgtcctaatttactggctctctggtaattaagtcataaatggtcaaacatcaaattctagaaaagcatatattt

SEQ ID NO: 1279 - DNA, 580 bp, Homo sapiens
aaaggagattgtttcaaaatatttttgcaaattgagataaggacagaaagattgagaaacattgtatattttgcaaaaacaagatgtttgtagctgtttcagagagagtacggtatatttatggtaattttatccactagcaaatcttgatttagtttgatagtgtgtggaattttattttgaaggataagaccatgggaaaattgtggtaaagactgtttgtacccttcatgaaataattctgaagttgccatcagttttactaatcttctgtgaaatgcatagatatgcgcatgttcaactttttattgtggtcttataattaaatgtaaaattgaaaattcatttgctgtttcaaagtgtgatatctttcacaatagcctttttatagtcagtaattcagaataatcaagttcatatggataaatgcatttttatttcctatttctttagggagtgctacaaatgtttgtcacttaaatttcaagtttctgttttaatagttaactgactatagattgttttctatgccatgtatgtgccacttctgagagtagtaaatgactctttgctacatttt

SEQ ID NO: 1280 - DNA, 307 bp, Homo sapiens
aaacacatacgaagaaatcaactgtgattatgaagtggcagccagctaaatatgtcttgtatttgctctcttcctttttttgcctaactcatcctttacttccattcctgcttccatggtaatgcaggctcaaataaattactaggatacaagattacttcaagcctcttttctgtggaactcataatatgataagcatttgttacaagattgcctgtagttgtttaggggataaattatattagggaaagaaagtctttctttagttggttaaattttctattataattgggtactaaatttattt

SEQ ID NO: 1281 - DNA, 235 bp, Homo sapiens
aaaatattttaatagttacatagcactttagtttgctgatttaatttatcccaagggacaaggatgttaatgagaaaactgactagatttcagatcacagattttaagagaacaaggatctcaaaaccaaataccctctgcttaaagtgttttttgtgtttttcactactgaaaatgtttagagattgacttacctattgctgatactcaaaacatctgatatcttaatattttt

SEQ ID NO: 1282 - DNA, 230 bp, Homo sapiens
  misc_feature 194: n = A,T,C or G
aaagaatttctttataagattkactgtmtaagattaatagcattcgaagatccccagacttcatagaatactcagggaaagcatttacctcsgtcgctgaccackctargggcsawggccagcacactggcggccgttactagtggatccgagctcggtaccaagcttggcgtaatcatggtcatagctgattnctgtgaggtaccagattgcctgtagttgtttagggg

SEQ ID NO: 1283 - DNA, 638 bp, Homo sapiens
aaacacaacagctataaacctgaacacatatgctatcatcatgccataagactaaaacaattatatttagcgacaagtagaaaggattaaatagtcaaatacaagaatgaaaaacgcagtacatagtgtcgcgaactcaaatcggcatttagatagatccagtggtttaaacggcacgtttttgcttataaaaaaagtgcaaaaaagatgtggtttacaagttaaagctacagaatccctttttgctgtaattgcaccagttttaaagcctctggacagagcagtatttcgtttaaaactttgttyttcttaaaagcttacagtgtttggctaattctcctcycctttttacaagacgggggccggagggtggacactggtggcaggttaagggatactgtcactttaagaagcctgcagattgaagtgtaaacatggagaaattaggggctgattttttaaactgtgtgagatattaaccagccgccctgttataaaatcaggaaatccaaacagcgatttacaccgattaacaccccctttatatattttttacaaaaatacactgagaaaataatcaaacgttttcatctctcttgtctttttttgttttttaaaagtgtcaaaagtctacattt

SEQ ID NO: 1284 - DNA, 745 bp, Homo sapiens
  misc_feature 715: n = A,T,C or G
cgacggtatcgataagcttgatatcgaattcctgcagcccgggggatccactagttttgaatttacaccaagaacttctcaataaaagaaaatcatgaatgctccacaatttcaacataccacaagagaagttaatttcttaacattgtgttctatgattatttgtaagaccttcaccaagttctgatatcttttaaagacatagttcaaaattgcttttgaaaatctgtattcttgaaaatatccttgttgtgtattaggtttttaaataccagctaaaggattacctcactgagtcatcagtaccctcctattcagctccccaagatgatgtgtttttgcttaccctaagagaggttttcttcttatttttagataattcaagtgcttagataaattatgttttctttaagtgtttatggtaaactcttttaaagaaaatttaatatgttatagctgaatctttttggtaactttaaatctttatcatagactctgtacatatgttcaaattagctgcttgcctgatgtgtgtatcatcggtgggatgacagaacaaacatatttatgatcatgaataatgtgctttgtaaaaagatttcaagttattaggaagcatactctgttttttaatcatgtataatattccatgatacttttatagaacaattctggcttcaggaaagtctagaagcaatatttcttcaaataaaanggggttaaactttaaaaaaaaaaaaaaaaa

SEQ ID NO: 1285 - DNA, 190 bp, Homo sapiens
cgacggtatcgataagcttgatatcgaattcctgcagcccgggggatccactagttattaatagtaatcaattacggggtcattagttcatagcccatatatggagttccgcgttacataacttacggtaaatggccgccaccgcggtggagctccagcttttgttccctttagtgagggttaattgcgc

SEQ ID NO: 1286 - DNA, 153 bp, Homo sapiens
ctgcatctttctacaattctaccagcaatatatgagggttacaatttctcyccatctttgtgaacgcttgttagagtctgtcctcttttcttccattctgtgggttggctttttactttctaaatggtagaaccttcaaagcacaaaggtttt

SEQ ID NO: 1287 - DNA, 232 bp, Homo sapiens
aaaaacacaaaacactagaacagttgctatgaaattactgataatgatccctttaataaactgcaattaaccactaatatagaaattcaatttaagcaagaagttttatatattatactttacagaaaaaaataattttgaaaaagtaatgmcaaacagagatcaaacatttagggcattagttactgcattctctttttagaatatacattaagtaacactagtaaaattt

SEQ ID NO: 1288 - DNA, 90 bp, Homo sapiens
aaacttagtgactatttagttcaattgytcatccattttttatttgcttttataattgcctccttgttttggtatattgtaaaataattt

SEQ ID NO: 1289 - DNA, 670 bp, Homo sapiens
aaatcacaaagtaaggcaccattggattaaacatttctcctggcttttactaagtaaaatgcatagtgaaataaatactgaacactgagttttaatactgtaatacatttcaatataaaataagaggtgaatgttaaaatactgtattacatgttgaatacatttatctgaaaatgttataaaaaaacacacatgtaagctctgatttcagggaagaaaaattcatttttgtaattttccatagtttaagattttaccacagaacttattcatagttttagatgcaattaggttgcaaactttcaaagaaagggtgtaggtgtattaatgaaacagtcacttaaacactacattctaaaacaatctattctggatgaatggcaactttgagctatcaccctgtttcagatttagaacggtacctgccaagttcagatatgcaaaggaattgtccaattcttactaccccttataaaattcagactcactttctctgagtcagacttttctccgtcatattttctaggaagggcaaattccatcttttgtgaaatgggtcattaggctttatcatagggatgtttttcactgttgaaatcagataaaagaatcccaaataaatgatgctgctaaattaccaaactgctagagattaaaaaaattttttttt

SEQ ID NO: 1290 - DNA, 352 bp, Homo sapiens
aaacaatgctacacccatttttggcaaagtgctgtattgttcagtctgtgtacaaaactgaccatctatgaaccaatcagtataaaaaatttctataaaaacaaaatttagacagtggctcaagaaaacaagctgccatttatgcatagattgatgtacagtaacctaaccaaatgtcccttttgaattttcaagttactgaaaaaaaatgtgtcgagaaacacattaagaaggcacatgtacagtctacaatactcttcagtctccctaactcatgccctgcccctataaaggaaatatgttcacaattttacttgagaaaaaaaaacaaagccacttaaaaaaaaaaaaa

SEQ ID NO: 1291 - DNA, 99 bp, Homo sapiens
aaaaattatttaaggtaatggtgttacgaatggtttaaaaatgtctggtgacttgcttatttttaagtgatcaccattaagtcagaaaaatgtattttt

SEQ ID NO: 1292 - DNA, 295 bp, Homo sapiens
aaatatacctttatttctcaaactcaaagctttatcaagttctaacacattttgcattgacaagtgattttatctgcatcaagtaaggttagtgaccaccacgaaagaggaatccccagacctcctaggcactaagaaatatttcaaaggctatgcaaatatagaacaaaaagctttcaatttagtctaattggtatctatttttcatctatattaatttggaaataagttgctaccttagaaaaattacatttttatccattaaaataaaacaccagataggttgagttttttt

SEQ ID NO: 1293 - DNA, 256 bp, Homo sapiens
agattcacttcaaagtgaaaatgacaacacatctcaagaaactcaaagaatcatactgtcaaagacagggtgttccaatgaattcactcaggtttctctttgagggtcagagaattgctgataatcatactccaaaggaactgggaatggaggaagaagatgtgattgaagtttatcaggaacaaacggggggtcattcaacagtttagatgttctttttattttttttcttttccctcaatccttttttattttt

SEQ ID NO: 1294 - DNA, 90 bp, Homo sapiens
aaaatacttagctttattaaagacatggtactaaaaataacagattccaacatttgctctatttctacttatatatcataaataagacag

SEQ ID NO: 1295 - DNA, 519 bp, Homo sapiens
ctgtcgctttatcagtgctatatttatctggaatatagaggctccttttactgtttttaaggtgctttgtgctaaggatgaagatacaattcctcagctcttggtagacttttgggaagctcagctagtggcatgtctcccagatgtggtacttcaggaactctttttcaaactcacatcacagtacatctggagattgtctaagaggcagcctcctgacaccacaccattgcgaacatcggaggatcttattctcctggtcattccttggtagatatttggaataaaataatcacactgactgtgattgggtagatcacattccatattctcctgtgagtctcagaagatgcttcattttgtagaacggtgtaagtggtttccattccagcatgaatgtggtcggtcacatggcagtggagtaaccaaattccaggtgttcttggaaacatttctagggtttggtatgttccagggaaaatgtcaaagacatcagaactataaactcccctgtgcttg

SEQ ID NO: 1296 - DNA, 419 bp, Homo sapiens
aaagcaaacagcagaaaccagaagcttctgaccctctaacatgtattactgtccaacccaccatgagaagtatgttcacttggtgacaacaaagagactccgtatcatatgtatgttaatgaccagattgttcatatgggatttttcttaacagattatcaggttgagaatgattctttttctccaagggcaagaaaaagctggctaaatgctagttaattaaatccattctcaattttgaactgtagagaagaacctgacttgaatgagattttctaaaggaagacatttcttgctcaacctcaggtataattagattataaggaatctcacgtccagaattttatctgctgattgttagtatggtaggtaattggccttaggacactatttctactagaaccctttacattattttt

SEQ ID NO: 1297 - DNA, 199 bp, Homo sapiens
caggtctgaagattttacatgcagataccagataccttaacttgtatttctttagtcatcttttggcttggaagtttcctctgttgtctttgctgaatccttcgctttacctccattcttaggtgctttggagctggaagcagccttcttgcacttatcctttgctgtgttctgtgaggtttctgtagtggagggacag

SEQ ID NO: 1298 - DNA, 484 bp, Homo sapiens
  misc_feature 437, 456, 467: n = A,T,C or G
aaatacacttgaaaagtaaaatgtttttctagcttttccctcagggcgtaacaccacaccattcataacaatgctattttccaaaggtttcaattagatttcctcagaagcatacctgaactgttaatcattacaactcctttgtgaaacatgggactggttgattacccagtgtaatcactggctgaaacctcagcacactgtttttcaccccagtggaggcaggttttcacctcccctctagctgtacccctctcttaatgcccatattagagaactgtgatcttctttctccactagaaatgttcactttcatcaggtaagggataaaacaaaaacaagagacagaagatcttaaaaaaaaaaatagtaatagggcaagtaaactcagtgaggttagaggaatttgtttggggggcattctatgttgttagytncatatcatgttcagtttgntggttctaganccctctgaaatgcatta

SEQ ID NO: 1299 - DNA, 419 bp, Homo sapiens
aaagtccatctttgcaaattatacgttgctataaatacattgtgtatttggcattatgtgaatttgtttaatccagtgtcaattgtctaatggtctaaagtgtcccattgaagttataatctggatgaactgaacaataagagaagttttcttcattagcccaattgtttatcactcaattcctactcctgcccatggtttcttccaccttcctctggagaacataaagagattctagatctctgtataaggtggtttgctttagcttgaaatcatcagtgaggattatacatgggcaatgtccagaaatcacattattgctcatagaccgtgtagtcttgatctaacggataactgtacattgtcttcactaagaagctagggtggttgtccttgatattgggacattgtagacttgg

SEQ ID NO: 1300 - DNA, 182 bp, Homo sapiens
  misc_feature 3, 5: n = A,T,C or G
ccntngaattgtgtgcatagggaagcactcacccaatgagactttctccaatgtggactctgtgtgtcagggaatgaatgtagaaaaattcactttggagggttatcakctcaactagtaagaagcattaatattattaaagtgaagaaactgcagagaaaattacagaacaaaactgtagg

SEQ ID NO: 1301 - DNA, 312 bp, Homo sapiens
aaagtttttatctctgctgaggcttcacatctgtttgctcaattttatttttatttcaatccttgagcatgtttataatatagtagtatccccttattgtggctttactttcctcactttcagtcacccacagtcaaaaaatatgaaatataaaactccagaagtaaacagtttataaattttaagtcacactttgttctgaggaatgtgatgcaacctcccgccattctgctgtatccagttcaggatgtgacatacccctttgctcagcagatacacaattcctgcttcctgctcattagacatttgcag

SEQ ID NO: 1302 - DNA, 109 bp, Homo sapiens
attcttagattatatgtgtccatctttgcagctttctgagagtaattttatttgttgtcttctgaaatgtacatgtatacatgtacctactgagtgctatgtgattttt

SEQ ID NO: 1303 - DNA, 330 bp, Homo sapiens
ccagagttacttggatcagcatttaggaaagtaaaatatagtggaagtaaaactgactcatccaactagacattctacagaaagaaaaatgcattattgacgaactggctacagtaccatgcctctcagccagcccgtgtgtataatatgaagaccaaatgatagaactgtactgttttctgggccagtgagccagaaattgattaaggctttctttggtaggtaaatctagagtttatacagtgtacatgtacatagtaaagtatttttgattaacaatgtattttaataacatatctaaagtcatcatgaactggcttgtacattttt

SEQ ID NO: 1304 - DNA, 170 bp, Homo sapiens
ccactgtagtctgcatatccctgtccatatccatagttcccatagttatacccagtataatcatatccgccatagccactatagttttgatcaccaccataggcactattgtaatttccatatccttgatcataatagttattaaatccttggttccagttttggccctg

SEQ ID NO: 1305 - DNA, 468 bp, Homo sapiens
aaaaataaatatttatactccagcttttgtgtatttggtgtacatcaccacttatgcaaatcaaggatcagaaaactggaggttagccatctccattatttccttttgcacattgggtacagtgggtggcattagtatgcactagctgcaaagtcacagcaccttatggaaataagtatgtttattataataaaaaaaagttaagctgcatctctgtagattatttactttgcagactgtaaagctgccctatcttttccagcagaatttactcttccattcttaattcttttttgaaatatcttaaataatttaacattcctttataacttcttaacagtgtcaaaactggggtagaagggattttattttttcccaaaagggttccatctttgctatctgttgatcagccttagaaaatctaagtatgatcaataaattttaatggttgatggcatcctgtgtcag

SEQ ID NO: 1306 - DNA, 326 bp, Homo sapiens
tggtaaagaactacctgttaatgcacaaaactatgtgcgatttattgaagatgagcttcaaattccagttaagtggattggtgttggtaaatccagagaatctatgattcaactcttttaatgattgccagtaatgcaagaaacactccttgagagggaggggaaaagactttcttaaatatttcatttatgacctgcaaattcaagaataaagacactgaagtaagtttgaagccctacagytgtttccagtcttttcagatggatgcctactgtggagattaactttggcatattccagtgtcagctttctttagctggaattg

SEQ ID NO: 1307 - DNA, 614 bp, Homo sapiens
  misc_feature 294, 442, 458, 465, 580, 592, 609: n = A,T,C or G
aaaaattattactgtaagaaatagttttataaaaaattatatttttattcagtaatttaattttgtaaatgccaaatgaaaaacgttttttgctgctatggtcttagcctgtagacatgctgctagtatcagaggggcagtagagcttggacagaaagaaaagaaacttggtgttaggtaattgactatgcactagtacttcagactttttaattttatatatatatacattttttttccttctgcaatacatttgaaaacttgtttgggagactctgcattttttattgcggnttttttgttattgttggtttatacaagcatgcgttgcacttcttttttgggagatgcgygtytgytgatgttctatgttttgttttgagtgtaggctgactgttttataatttggggagttctgcatttgatccgcatcccctgtggnttctaaaggggatggncctcagnaactgttgcatggatcctgtgtttgcaactggggaggacagaaactgggggtgatagccagtcctgccttaagaacatttgatgcaaagaatgggaccctgccccggggccgggncccctccgaaangggggggaaaatcccangcacc

SEQ ID NO: 1308 - DNA, 304 bp, Homo sapiens
ctgtcttttggaggacgtacgtaataaggttttaatttagtaaaccaatcctatgcatagtttcagcactagccaaacctcaccaactcctagttctagaaaaacaggcacttggcagccttgtgatgtcatacagagaagtcacaggcagtacctgagggtctgtaggttgcacactttggtaccagataactttttttttctttataagaaagcctgagtactccacactgcacaataactcctcccagggttttaactttgttttattttcaaaaccaggtccaatgagctttctgagcag

SEQ ID NO: 1309 - DNA, 289 bp, Homo sapiens
gggatttccaattaacagtattaccagataaatattcttggtccaagcagaaaatatcaacaaaaagagccttcttctcctgtaaatcttaaatgcctacatcactctttatgatacatggatcatcttatgtggatacttaaatttttcatgtctgcttcttttgcctctcccaactatactatgaggaaattcggaacaaagacatttttgtaatatttcttatctccttcacacctagtatagagctgattttacaaaggcatttaagagatatttgaattgattt

SEQ ID NO: 1310 - DNA, 534 bp, Homo sapiens
  misc_feature 480, 490: n = A,T,C or G
tgctttgcattttctgatgtattacatgactgtttcttttgtaaagagaatcaactaggtatttaagactgataattttacaatttatatgcttcacatagcatgtcaacttttgactaagaattttgttttacttttttaacatgtgttaaacagagaaagggtccatgaaggaaagtgtatgagttgcatttgtaaaaatgagactttttcagtggaactctaaaccttgtgatgactactaacaaatgtaaaattatgagtgattaagaaaacattgctttgtggttatcactttaagytttgacacctagattatagtcttagtaatagcatccactggaaaaggtgaaaatgttttattcagcatttaacttacatttgtactttagagtatttttgtataaaatccatagatttattttacatttagagtatttacactattgataaagtttgtaaataattttctaagacagnttttatatangctacagggtgccctgattttcttattgaatttggttagactag

SEQ ID NO: 1311 - DNA, 114 bp, Homo sapiens
aaaatttgtaggagttgtagactacctaaatttttaagttatggyatttggtcataggttgactgggtaggtaaagaaggaaacagacaagaaaatggcttcttgaggtggcag

SEQ ID NO: 1312 - DNA, 95 bp, Homo sapiens
gggcgggtaaaggtaggccgcgagagcgaggttaggagaggataggaggccgcagtactgctcacacgctccgctcttctcccactctcgactct

SEQ ID NO: 1313 - DNA, 519 bp, Homo sapiens
aaatgatacagtattttaggtatgatttaagactatgatttacctatacattatatatattttataaagatactaaaccagcatacccttactctgccagagtagtgaagctaattaaacacgtttggtttctgaataaattgaactaaatccaaactatttcctaaaatcacaggacattaaggaccaatagcatctgtgccagagatgtactgttattagctgggaagaccaattctaacagcaaataacagtctgagactcctcatacctcagtggttagaagcatgtctctcttgagctacagtagaggggaagggattgttgtgtagtcaagtcaccatgctgaatgtacactgattcctttatgatgactgcttaactccccactgcctgtcccagagaggctttccaatgtagctcagtaattcctgttactttacagacaggaaagttccagaaactttaagaacaaactctgaaagacctatgagcaaatgggctgaatacttttttttt

SEQ ID NO: 1314 - DNA, 518 bp, Homo sapiens
  misc_feature 247, 270, 329, 357, 419, 440, 498: n = A,T,C or G
ccatggtgggtgaagacgctgatctgccctgtcacctggggttttttatgagtgcagagaccagggagctgaggaaacccgagytccagcctaaggcaggtggtgaacgtgtatgcagatggaaaggaagtggaagacaggcagagtgcaccgtatcgagggagaacttcgattctgcgggatggcatcactgcagggaaggctgctctccgaatacacaacgtcacagcctctgacagtggaaagnacttgtgttatttccaagatggngacttctacgaaaaagccctggtggagctgaaggttgcaggtgagcctccaggttttgntctgagaacacttctctgtaggatctanagcagatgcagagtccctcttccaaaagtactgcagacactcctggctgctcactagcaatngtctgcactgcctcccaactnagcttctctgcaacccttaagaaagacacattctttctttagaaagaattcctgctgnaccttacatgccgaagtaaa

SEQ ID NO: 1315 - DNA, 360 bp, Homo sapiens
tctgtgcatccaatttattatagwtttgtaagtaacaatatgtaatcaaacttctaggtgacttgagagtggaacctcctatatcattatttagcaccgtttgtgacagtaaccatttcagtgtattgtttattataccacttatatcaacttatttttcaccagkataawatcttratttytacgacctatcattctgaatcaagmacactgtatgttcagtaggttgaactatgaacactgtcatcaatgttcagttcaaaagcctgaaagtttagatctagaagctggtaaaaatgacaatatcaatcacattaggggaaccattgttgtcttcacttaatccatttagcactattt

SEQ ID NO: 1316 - DNA, 277 bp, Homo sapiens
aaaaaacacgtttgttattaccaaawagagacggctttaggtaaaaataataaaaaccctttgcttgyattacytatgcaratagttstatttatctggwcwacgggytaaaggyacagyactataggwctctggcttgagtmtttacgttcatttcttattgctggaatktcatatttcttcttgttggatgactaaaccggatgatggtagagatggtaagccggcatttactcagccccgccctgctcagcctcgggagcggacgaattctcag

SEQ ID NO: 1317 - DNA, 716 bp, Homo sapiens
aaaatgttctcttgagactagtaggcatagaagaaagcagaaggaaaataaatagaaagaaggtcttctaccttcatggctattcaggctcaggagggtggagagaaaaagaaggaggacaaatgaacaagacagatgagggagacatcctctctgatataagatacagtcctctctggtggatggagtccaatttgtgtaacttcctatgtattttcctagataggaccaccactatttgagaaaatatctcactggtaacctaaagccaaggataataaaccttgatatacttaacattcaatttctttccagcaatgtgataaataaatctatcttgtgtttctcttgcagattgtaaaagcattagaacatttacatagtaagctgtctgtcattcacagaggtaagcatccatgagctgccttggctgttcctttgataaagttcatctctttcacctggagtccgtctctacccccagtcccccatgggtggaagtagaattgactcaggcaagagaactaaggggctttcctttgagattggatagcaaaccatataagtagtattccttatcatggctgaggacataagaagaagacgtgatctttgtcttacatccaaattgaatataaacacttggtagcaagcagagctatgagatcatatcattgagaattttagagaatatgataaaaattgatcttgtctgg

SEQ ID NO: 1318 - DNA, 515 bp, Homo sapiens
aaagctgtatcatgttgagtaaacctgacctgagccagcggtttaaggcgattttgctcgatgaaggtcaagacgtgaacccggtcattgccgacttggtaaggatacagcgcatctgcaaagtaaccgtcggcgaccctcaccagcagatttaccgtttccgtggtgccgaagacgctctcaacagcgattggatggccgatgcagagcgtcactacctgacccagagctttcgcttcggtccagcagtcgcgcatgtggctaacatcatacttttttacaagggtgaaactcgaaagctgcaagggttaggccccaaaacccaggttaaacgtgcgcttcctgaagacctaccgcatcgcacatacatccatcgcacggttaccggcgtcatagagaacgcgcttagcttggtagcgagcaatccaaagatctattgggtaggtggcatcgacagttattcattgcgcgacctggaagacttgtatctgttcagccgcaaccaaaaccaagcc

SEQ ID NO: 1319 - DNA, 141 bp, Homo sapiens
aaatttagtgtctcatttggaaataaactctgggcctattagttgttgagtattttttttttttactacctaaaaaaagatttgttaagagctgaattacaacttagcattacataatataaaacactgtaatgtgtattt

SEQ ID NO: 1320 - DNA, 497 bp, Homo sapiens
aaattcagtcctaagaaagaggagtgcttgtcccctaagggtgtttaatggcaaggcagccctgtctgaaggacacttcctgcctaagggagagtggtatttgcagactagaattctagtgctgctgaagatgaatcaatgggaaatactactcctgtaattcctacctccctgcaaccaactacaaccaagctctctgcatctactcccaagtatggggttcaagagagtaatgggtttcatatttcttatcaccacagtaagttcctactaggcaaaatgagagggcagtgtttcctttttggtacttattactgctaagtatttcccagcacatgaaaccttattttttcccaaagccagaaccagatgagtaaaggagtaagaaccttgcctgaacatccttccttcccacccatcgctgtgtgttagttcccaacatcgaatgtgtacaacttaagttggtcctttacactcaggctttcactatttccttt

SEQ ID NO: 1321 - DNA, 344 bp, Homo sapiens; identical to SEQ ID NO: 1148

SEQ ID NO: 1322 - DNA, 110 bp, Homo sapiens
ccaccacatagccagccaggaatcccttgaggaacggggaggacaacagcgagccaccctggcccactccactgttgacttcgtcttctacacgccgctgcaggctttcc

SEQ ID NO: 1323 - DNA, 359 bp, Homo sapiens
ccacgctgctggcctgggctggcgtctcctgctgtgagctggctgaggaggacttcctggcggtctcccccttagatccgcgctatcgtgaggtccactatgtcctgctggatccttcctgcagtggctcgggtgagatggtgagaaggcgtggctgagggactcagaggtccacagcagcttagacctggagtcatctgttttggtcttagttctgacactttaatgggcttgggaccctggagcaaaagttctcctctgtgaagcgaggatttcaggagcgaggatttcaggactgaggcagcctgtgaagctgtgtaaccgagacacgcttttccttaggtatgccgagcagacag

SEQ ID NO: 1324 - DNA, 258 bp, Homo sapiens
caatcacacaaccacaaaaaagatactgtgtgctctcactttccaaaattctgcctggtctmctcctgaggaaagyagtgatatggtagctggtgtggatcccctaaaggaattataagatggartgygargaacattatcttagactataakactgkctgcatrcrgatatgktstcraagattattcctgctgcraataaagakmttgskaaagagcartatasagctatcacagtctattgacccamasatgttt

SEQ ID NO: 1325 - DNA, 534 bp, Homo sapiens
ctgtccaatggcaacaggaccctcactctattcaatgtcacaagaaatgacacagcaagctacaaatgtgaaacccagaacccagtgagtgccaggcgcagtgattcagtcatcctgaatgtcctctatggcccggatgcccccaccatttcccctctaaacacatcttacagatcaggggaaaatctgaacctctcctgccacgcagcctctaacccacctgcacagtactcttggtttgtcaatgggactttccagcaatccacccaagagctctttatccccaacatcactgtgaataatagtggatcctatacgtgccaagcccataactcagacactggcctcaataggaccacagtcacgacgatcacagtctatgcagagccacccaaacccttcatcaccagcaacaactccaaccccgtggaggatgaggatgctgtagccttaacctgtgaacctgagattcagaacacaacctacctgtggtgggtaaataatcagagcctcccggtcagtcccaggctgcag

SEQ ID NO: 1326 - DNA, 177 bp, Homo sapiens
ctgcattatgtgtgtttagaacgagaagttgtttgtacagtatttttctattgaccgcttccgtcttgcctgaaacctgggcattctttccaatagacagaaaatcagagagtcaaatctgatgcgcaatgagttgttctgagaccagtaatccacggtgctgcaatttgggttttt

SEQ ID NO: 1327 - DNA, 266 bp, Homo sapiens
aaacttgttttatctaatactgagcactgtttttttgtcaagtatttttttaagaccacataattctttttgtctgctcaaggaaaggatagataaataattggcacacatttgtttctcactgaattttacagtagtaaattaatgttataatgtaccacatggagatgagttggtaagaaatcatctagttccagagcccagggattataaacagtaggtgaaatagatttatgacttacgaaatatgttgtgacaatatattt

SEQ ID NO: 1328 - DNA, 409 bp, Homo sapiens
ctgtccaatggcaacaggaccctcactctattcaatgtcacaagaaatgacgcaagagcctatgtatgtggaatccagaactcagtgagtgcaaaccgcagtgacccagtcaccctggatgtcctctatgggccggacacccccatcatttcccccccagactcgtcttacctttcgggagcgaacctcaacctctcctgccactcggcctctaacccatccccgcagtattcttggcgtatcaatgggataccgcagcaacacacacaagttctctttatcgccaaaatcacgccaaataataacgggacctatgcctgttttgtctctaacttggctactggccgcaataatcccatagtcaagagcatcacagtctctgcatctggaacttctcctggtctctcag

SEQ ID NO: 1329 - DNA, 136 bp, Homo sapiens
ccattttcgcacagtccaccataaaattgaaaagattgaccagagacagatcatggagggcttggcaatctgtactgatgaagccatggaccagaagagaagtgagtcaatgaagagagtttctcttttcacatgg

SEQ ID NO: 1330 - DNA, 311 bp, Homo sapiens
ctgctaacagccctaacggtgcaacacaagtacaaactcaggaacctcttcgactgccacgcccttcaccaacagaaggaagacagtggcgccaccacaagtggcagggcacaggggcttctgtgacaacaatatgtccttctagtatacattcattgcaaaggctgccctgaagtttcgtttttggaaataactgttatcatacattttgtatgatgttgcttgtgggcaccatgaagagagcctggctgtaaaggacagagggagctaaaccaacaatgcatggccctgcgtgcccacaagagggagcc

SEQ ID NO: 1331 - DNA, 613 bp, Homo sapiens
ctgggccakgagctgtgcccggtgcctgcagccttcataagcacacacgtccattccctactaaggcccagacctcctggtatctgccccgggctccctcatcccacctccatccggagttgcccaagatgcatgtccagcataggcaggattgctcggtggtgagaaggttaggtccggctcagactgaataagaagagataaaatttgccttaaaacttacctggcagtggctttgctgcacggtctgaaaccacctgttcccaccctcttgaccgaaatttccttgtgacacagagaagggcaaaggtctgagcccagagttgacggagggagtatttcagggttcacttcaggggctcccaaagcgacaagatcgttagggagagaggcccagggtggggactgggaatttaaggagagctgggaacggatcccttaggttcaggaagcttctgtgcaagctgcgaggatggcttgggccgaagggttgctctgcccgccgcgctagctgtgagctgagcaaagccctgggctcacagcaccccaaaagcctgtggcttcagtcctgcgtctgcaccacacaatcaaaaggatcgttttgttttgtttt

SEQ ID NO: 1332 - DNA, 591 bp, Homo sapiens
  misc_feature 10: n = A,T,C or G
ctgagttaanatggtaaagccaatattattttaggaggaaagaggacgaaggccaatgaaccaacatctgcctgctatctggtgcatcacccaaggtgaccaatggctgggcacaaataaacttctcttttgctagccacagagttgctcactgtggcaagcctgagctggtcagaacacctgtgtgtgtgttcctgatacacactaaccacaataagcaagtctgcacacatctctatgagccccatgcaaagacaagacattcccaaagatcagtcactagagtgcaacaacgaaattcaagatttgaccaaaacagaccctgctgcctcctaaattgccaattgcctctcaaaaacttacagaaaaagggacattataagaattcatagagggagagaagaaaaagctgctactcctagtcattagtacaatgtgctgtgttaattagatacctctatataaattagaaaaagtgctttacttgcatgcttcaataaaatgaatactgagtgtcgtagtgttagatctgtacagatataaattttttgcagctatataaaagtgtataagatgggcttttgcatttta

SEQ ID NO: 1333 - DNA, 379 bp, Homo sapiens
ctggtacaaaggcgaaagagtggatggcaacagtctaattgtaggatatgtaataggaactcaacaagctaccccagggcccgcatgcagtggtcgagagacaatataccccaatgcatccctgctgatccagaacgtcacccagaatgacacaggattctataccctacaagtcataaagtcagatcttgtgaatgaagaagcaaccggacagttccatgtatacccggagctgcccaagccctccatctccagcaacaactccaaccccgtggaggacaaggatgctgtggccttcacctgtgaacctgaggctcagaacacaacctacctgtggtgggtaaatggtcagagcctcccagtcagtcccaggctgcag

SEQ ID NO: 1334 - DNA, 384 bp, Homo sapiens; identical to SEQ ID NO: 251

SEQ ID NO: 1335 - DNA, 555 bp, Homo sapiens
aaattagttgctataaattcatcaatactttttttccctattatatttttggttctattaggatttacttaactgaatcttataacaattcgaggtgaactgtggcaatgaaaaccagaaacagttaatgagatgcttcagctcacagtttgaagtgctgagaacctaagtattttgctgtacggtactgagctgtaccaaaatatgatggtttaggtttatgtgcaagactttgtgttgtagtctagacaaaggggtgggcaagagacatgcaaagctgaagccctgcttgaaaagacccttcaaggaagtaaaatggcaggggcagagtgcagcttaacatgttgctatccctgttgtttttgagttggttttggaatggattcaagttcttacacaatttattttgaatacaagcataatctaggtgatttgagttaatgaacttcttttcatgatgtagggaaagctgaatgtatatatttctaagaagaatttgtttagcagattacaagttggcaaaatagactgttcacagaaactaggcaaaaattt

SEQ ID NO: 1336 - DNA, 505 bp, Homo sapiens
cctggaaagaagcccagcaaaaggttccagatgaagaagaaaatgaagagagtgacaacgaaaaggaaactgaaaagagtgactccgtaacagattctggaccaaccttcaactatcttcttgatatgcccctttggtatttaaccaaggaaaagaaagatgaactctgcaggctaagaaatgaaaaagaacaagagctggacacattaaaaagaaagagtccatcagatttgtggaaagaagacttggctacatttattgaagaattggaggctgttgaagccaaggaaaaacaagatgaacaagtcggacttcctgggaaaggggggaaggccaaggggaaaaaaacacaaatggctgaagttttgccttctccgcgtggtcaaagagtcattccacgaataaccatagaaatgaaagcagaggcagaaargaaaaataaaaagaaaattaagaatgaaaatactgaaggaagccctcaagaagatggtgtggaactagaagg

SEQ ID NO: 1337 - DNA, 385 bp, Homo sapiens
ctggtgctagtcagagctaatgacagaatttcagtttaataaaaagacccccaactgagcacaccatcttgaaaaaagtatacttatcaaacagctttcaatcagttcaagagagacaccttaattggggagaggaagaattgcagagtagtttgtaatcatgccaattccagatcaataactgcatgtctgttctttggtagaaatagcttttgctttatattaagtaatcacatatatattctctctatttggataaggaaaccttcgctttatttgacaatgtataatgatatactcttctaattcacctctgtgtcttcacaataaacatgagtaaaatttagacaagtgatggtaaaggtcaatataattatttattttt

SEQ ID NO: 1338 - DNA, 350 bp, Homo sapiens
aaaggtgatattacacaaaacctcgtcttttgttcaactttggatccattggcaattcaatggcctcaatctccccaaactcgccaaagtactccctgatcttttcctcagtggcttcaggattcagacccccaacgaagattttcttcaccgggtccttcttcatagccatggcctttttagggtcaatgacacggccatccagcctgtgctccttctggtctaggaccttctccacactggctgcatctttgaacaggataaacccaaaccctcttgaccgtccagtgttgggatccatttttattgtacagtcaacgacctctccaaatttagtaaaatagtctttt

SEQ ID NO: 1339 - DNA, 443 bp, Homo sapiens
ctgctcctctagtaataagttcctggggataatacattaaccaacattggttgaaacatacctgagtaatcatatcaggatgcatgttaagctgataaaacaataagatcccaaaatgcagtagctcaaaaaaagtagaagttaatttatctcctgggggacagctctggttctcaaattttacaggctcagaatcacctgcagggcttgtgaaagtacagattgctgcgctccgcccccagagtttctgatttagtaggtgttaggctgaaccaagaatttgcctttctaacaagctcccaagtgatgctgatgacttgtaggaatggatttacttctaggattagacttcagctcactctgtttgctgaactctttctaatatttcttaagttggtagactcyctgctccaggttctcaacgtgaaggaaggaacccccag

SEQ ID NO: 1340 - DNA, 273 bp, Homo sapiens
cctcaggaacaggtaggggcagcagaatagaatagcatccatttcccagagaaagactgcctttacatktcccatgcttttagcacaaagcagcgtctgggccactgttaccagaggtgagtttatacatttacaaaatgcttaaaatctttgggaagcaagaggaagctaaacagaaggtcccatgttaactgaaggcaaattcactcaacctctctagtaagggacccatgggcctacagagtgttccctctacaatgtgcagagtggaaa

SEQ ID NO: 1341 - DNA, 561 bp, Homo sapiens
ccatgggcccggtcacgaacaaaacgggcctggacgcctcgcccctggccgcagatacctcctactaccagggggtgtactcccggcccattatgaactcctcttaagaagacgacggcttcaggcccggctaactctggcaccccggatcgaggacaagtgagagagcaagtgggggtcgagactttggggagacggtgttgcagagacgcaagggagaagaaatccataacacccccaccccaacaccgccaagacagcagtcttcytcacccgctgcagccgttccgtcccaaacagagggccacacagataccccacgttctatataaggaggaaaacgggaaagaatataaagttaaaaaaaagcctccggtttccactactgtgtagactcctgcttcttcaagcacctgcagattctgatttttttgttgttgttgttctcctccattgctgttgttgcagggaagtcttacttaaaaaaaaaaaaaaattttgtgagtgactcggtgtaaaaccatgtagttttaacagaaccagagggttgtactattgttt

SEQ ID NO: 1342 - DNA, 159 bp, Homo sapiens
aaagatggcaaggcaataaatgtgttcgtaagtgccaaccgactaattcatcaaaccaacttaatacttcagaccttcaaaactgtggcctgaaagttgtatatgttaagagatgtacttctcagtggcagtattgaactgcctttatctgtaaatttt

SEQ ID NO: 1343 - DNA, 76 bp, Homo sapiens
aaaatgtaaagccaatctatcaccaaaaatggcataaatgtaaacacaagctaattttataatccactgctatttt

SEQ ID NO: 1344 - DNA, 726 bp, Homo sapiens
caaaagcagcctgaatacgcaactcacgccaagagggcagcagctctcctgacatccatgtaagaaggctaacacctaaaccacacgcaggcatcctgaactcagcagctctgatccaaggtactgagtggagacaaagcactcggaggtggcaagatgttcagcaaccaagtaagacacactggcaaggcatcccacccaaaggtgagaagcacaaagcaggcttggagaaacaaacagtcatgccaggtgcagccagacatcctgctataagccctgaccctagtaccccgagttcatcaagtgctctggttttgtgtccataaagcacagagggcactgaccaccccaaaccagaatcccaaggaatccttatggatggcatagggcctcagaactgctgcaggatcattttccttttcaggtcgtggctgaacttgttcatcctgaagagctcactgtcataaaatgcagagaggttgtggatgttgatctgacgagccttatccaccaagtccttmtcagggacctcaatagtgtcctgctgggccccaaagcggttgcgctgatatgtcacstgctctgccactaactgcttcagtatgaagagcaacagctcattgttgtcacgccggaatgaaaggtagcgggcaaaagtcttgcgcatgctgcgcatgacgctgaacttctgtgtgtctatgaagstctccakmatcaygagratgg

SEQ ID NO: 1345 - DNA, 742 bp, Homo sapiens
ccagagagccctgtcctgtgagggtggttatcacagtggcagggttcaattcagaagaccttgagggcaggctgatgtttcctgaatgggcccctggttgttgcttgtccctgactctccatttccccatctgagtggatttggacctaatagggcactggagctggttcgaatcctgactggactacttggcaactttatgtctgggagcaagttacttaacctccccaagcctgtgtctgtgaaatgcgggtaaatgaatgtagatgtttggcagcagctactccttgttgagctctcacagtgaactctcctgcctctgccctccttccccgcctcccctggtgcctagcgtcaggtctagccacttcctcctgggcccctctcccttttctgtggctggctgcctgcccgcctggcgctggacctttcatgtaacgggaatcagcatgtatattctggtctggtctgtttctacacttaattttgtttccagtagtatttccctgtaccggcagagttcacaaacacatttgaagaggctttttctcaggattcttaaccttccaaaggaagtcccatggatgggtttctagaagtctataaatgctctgaaattgtatttttctgtggaaaagcataacttttatctgcttggtcgtgctcaaaaaaagatcatgaatggaatgaattgcattgaattttatgccattgggggcttaatactaaaaggatatggaag

SEQ ID NO: 1346 - DNA, 573 bp, Homo sapiens
  misc_feature 498, 543: n = A,T,C or G
aaatgcattkttaacttacagtattttcaacttacgatgtgtttatcasgaagtaaccccatcataagcagaggagcatctgtattgcgtaatttgactggcacagtttattaggttctgttcagtgwtttccgtcaacaagatgtttattgtgtgagtaaacaagttaagccctgtgacaagctgaataagaatagtctctcctcagcagcttatagtaaacaagggtagtaatccttacattagtggctagactatcaaacgaaatatataacatgtaagaacactaaagacagaattactgtggcatagagatagttagaattgcttcagcctaagagatgaattaggtaatgcaaggaggtgaatatgttggcctgcaatatgaacaaggcagagagctgggagagtaagatgtaagttgctaaggagggatgtgtcttgagtttggaaaccataaagggaaatcataggtaatgctagagtcactgatcttanggagccttgaataacggtgatgactaagggaatctttattttggngggactattggaattaaattggccagaatt

SEQ ID NO: 1347 - DNA, 333 bp, Homo sapiens
cctggtttctggtggcctctatgaatcccatgtagggtgcagaccgtactccatccctccctgtgagcaccacgtcaacggctcccggcccccatgcacgggggagggagatacccccaagtgtagcaagatctgtgagcctggctacagcccgacctacaaacaggacaagcactacggatacaattcctacagcgtctccaatagcgagaaggacatcatggccgagatctacaaaaacggccccgtggagggagctttctctgtgtattcggacttcctgctctacaagtcaggagtgtaccaacacgtcaccggagagatgatgggtgg

SEQ ID NO: 1348 - DNA, 185 bp, Homo sapiens
aaaaaagcttgcagcaagaaaatgccagtgtgcaactgggtgactaaagaccaaagaaaaacagttaaaagggacagcttacttgctctctgtctcaggtttaacttctcacctgaaatctctcatagccctaattaaacacaaacaaaagtctcttccatagataggctacttctcagcttcag

SEQ ID NO: 1349 - DNA, 171 bp, Homo sapiens
gcggcagcgaggggctcggagaggtgctcggattctcgtagctgtgccgggacttaaccaccaccatgtcgagcaaaagaacaaagaccaagaccaagaagcgccctcagcgtgcaacatccaatgtgtttgctatgtttgaccagtcacagattcaggagttcaaagagg

SEQ ID NO: 1350 - DNA, 400 bp, Homo sapiens
ttgtcatatcatatctatgtcacctgtgtattctgagattacacacatacctgccaatatacctgggaaaggttattttatcacagttacacttgagttcttggcaggcaggactgaggaagagtaatttgaaagaagttttacatcctatttagaagaaatcactagtatttccttaaataacaggttacaatagaaagatactgcctggaagttatcctttcactttggttcatttttagtttttctttatgatttacatagctgtttaattcatttgcttatagtacaatcctgccataaagtattaaagcacaagatacctattattccttcaacatctgcatttttcaagttttatactctacatccacagtacgtcagcagttcttgaatgttt

SEQ ID NO: 1351 - DNA, 309 bp, Homo sapiens
ccaggaaagggcagtcctgagggagaagacaggattcagggcagtgctccgaagctgtgtgctcacctggttggctcatcaaacctggcaaccctgtggcctgtctgccggagctgactggatccactcatcaattcttcgtccccactactaagactgggcatgttttgctggtgtggtctctgcacttcaggaatggtcacaacagggggtagccctcaaaagcactcctttttctatacctcttctcaaggccatgtaagttgcccatctctacctggctgtggacaaaaggttatctgctcttgg

SEQ ID NO: 1352 - DNA, 268 bp, Homo sapiens
ccacttcatctgtgtgggaacgtggtcaggccgggtgctggtgtttgacatcccagcaaagggtcccaacattgtactgagcgaggagctggctgggcaccagatgccaatcacagacattgccaccgagcctgcccagggacaggattgtgtggctgacatggtgacggcagatgactcaggcttgctgtgtgtctggcggtcagggccagaattcacattattgacccgcattccaggatttggagttccgtgcccctctgtgcag

SEQ ID NO: 1353 - DNA, 620 bp, Homo sapiens
  misc_feature 545: n = A,T,C or G
cctgagtaattattccatcatagacaaacttgtgaatatagtggatgaccttgtggagtgcgtgaaagaaaactcatctaaggatctaaaaaaatcattcaagagcccagagcccaggctctttactcctgaagaattctttagaatttttaatagatccattgatgccttcaaggactttgtagtggcatctgaaactagtgattgtgtggtttcttcaacattaagtcctgagaaagattccagagtcagtgtcacaaaaccatttatgttaccccctgttgcagccagctcccttaggaatgacagcagtagcagtaataggaaggccaaaaatctccctggagactccagcctacactgggcagccatggcattgccagcattgttttctcttataattggctttgcttttggagccttatactggaagaagagacagccaagtcttacaagggcagttgaaaatatacaaattaatgaagaggataatgagataagtatgttgcaagagaaagagagagagtttcaagaagtgtaattgnggcttgtatcaacactgttactttcgtacattggctgggaacagtcatgtttgctttcataaatgaagcagcttt

SEQ ID NO: 1354 - DNA, 398 bp, Homo sapiens
aaaggattatttttatgcaaagtattctgtttcagcaagtgcaaattttattctaagtttcagagctctatatttaatttaggtcaaatgctttccaaaaagtaatctaataaatccattctagaaaaatatatctaaagtattgctttagaatagttgttccactttctgctgcagtattgctttgccatcttctgctctcagcaaagctgatagtctatgtcaattaaataccctatgttatgtaaatagttattttatcctgtggtgcatgtttgggcaaatatatatatagcctgataaacaacttctattaaatcaaatatgtaccacagtgtatgtgtcttttgcaagcttccaacagggatgtatcctgtatcattcattaaacatagttt

SEQ ID NO: 1355 - DNA, 371 bp, Homo sapiens
ctggytcctcagtgggaactgagtcattacctgctaaagggtagaagaggagagagagaggccagagcctggggatggggcagaaggtgcagcaggaaggaaggttagagtgagaaaaatttccaaataaggggtgatgtgtgagtgctcagagggtgactgaggacatctccagcatttccattgaggagggaggaaggaggggcccttgggttctggggcagatgccggcagggtctggatgagatgcccccaacctcaaccctggtcctctgaaaacacttcacccagtcacactgaggagcccctccaggcccaggggcccctccaggtaggcgtatctcagctcctctctggaaggacccccacag

SEQ ID NO: 1356 - DNA, 338 bp, Homo sapiens
gcggcgcgggcggcggtaaaatgtcggttccaggaccttaccaggcggccactgggccttcctcagcaccatccgcacctccatcctatgaagagacagtggctgttaacagttattaccccacacctccagctcccatgcctgggccaactacggggcttgtgacggggcctgatgggaagggcatgaatcctccttcgtattatacccagccagcgcccatccccaataacaatccaattaccgtgcagacggtctacgtgcagcaccccatcacctttttggaccgccctatccaaatgtgttgtccttcctgcaacaagatgatcgtgagtcag

SEQ ID NO: 1357 - DNA, 159 bp, Homo sapiens
ctgggctgctgcctctggagtacttccccgcagctcctcattgctcacatagtaggcaatggcgttgctctcaaacacacagaatccatcatcaccctcaaatgctgggaccttgccggcaggaaatttgcggagaaattcaggggtgcggttggtttg

SEQ ID NO: 1358 - DNA, 306 bp, Homo sapiens
cctgtcagagtggcactggtagaagttccaggaaccctgaactgtaagggttcttcatcagtgccaacaggatgacatgaaatgatgtactcagaagtgtcctggaatggggcccatgagatggttgtctgagagagagcttcttgtcctgtctttttccttccaatcaggggctcgctcttctgattattcttcagggcaatgacataaattgtatattcggttcccggttccaggccagtaatagtagcctctgtgacaccagggcggggccgagggaccacttctctgggaggagacccaggc

SEQ ID NO: 1359 - DNA, 382 bp, Homo sapiens
agagggagtccagcccccaagccttgtgaggcactgttargcagatagggaaaagaggggtccttagatcactggttcaaggagggatctggtaggggcagcatttcttctgggctggaaacagaatgggggtttcaagatggcagaaccattccattattggagctataagcccctagaattgctccatggcctatctcggtttcccttggatctcatctgctcctgaactgcacctgtcatggcaagtccatctccggcccccatctcccctgagccaatgtgagtcaggtgaacaaaattcattggttccccaatcatggtccggtcaatccgtcttctcttcttctttcttctccaccatccagacgttcagctacag

SEQ ID NO: 1360 - DNA, 365 bp, Homo sapiens
aaaaaacctttcaaaataaaacttagtaaaatctagaactgkttcttggcctacttgagaggaacttccatattttcacagccatctccgaaagcagcagttgctgtaaattaactgagacttggaaatggtgcagactgtcttggtagagctgttcttatagcacaattttatctggaaaataaacttgtaaatgcgtgctgtatattaatacatgtgtgcccatatttatttttattatctcctgccagtctttgctcaatgggagatgacagaccaacttctcaacgtgatttccccatttcattgaatgacatttatatgccacttatgaaaaaaatactgctgtgaaagaaatgtacttt

SEQ ID NO: 1361 - DNA, 502 bp, Homo sapiens
gaggtatggaaaaatatcaacaaggaaatattagatttgaactgctgcttcgttagcacacagcacattctccaggatataccatatgttaggacacaaaacgggtctcaataaatttttaaaagtcaaaatcttatcaagtatcttctcagaccacaatggaataaaactggaaatcaataacaagaggaacttctgaaattgaacagatacacggaaatcaaactacatgttcctgaatgaccactgtgtctatgaagaaattgattttaaaaatttaaaaattctttgaaacaaatgaaaatagaaacacagcatacaaaaatgtatagggtacaacaaaagaagtgctatgagggacatttatttcaataaacacccacatcaataaggtagaaagtttttaaacaaataacctaataaacgcatctcaaggaactagaaaagcaagaacaaatcaaacctaaaattagaaggaaataaatagtaaagatcagagcag

SEQ ID NO: 1362 - DNA, 545 bp, Homo sapiens
ctgattggatgtctaggaatgactgaaagaaaccaaaacagcctgtccactgctgctgtgggatggaggaggcgtaagcagaaacactaacagtatactgacctcttagcagaaccgcttccattctggagatcacggctgctaaatccagcatccccacttcattttacccccagcatattgttctgtagtcttttcttgaaacatcttgattgcttttcctcggcagctttcaaaaaaccaaataataatagttatccgtcttctacttcatggaagattgttttggtgccctgaccctctgaagtgcccagttcctgccatctgaaacctcggcctgatctgatctcatgttggaatctgcctgtctttcacacagggctggtcttggtcctttacatgccagttttgcttgtgaattcttgcttttttcctctcatcagccttaagtttaggcgtttgttgttctccagtgatgtagacagttcccttcacaagtcacagttcttcccataaatgaggcccgctgacctctgcgggacttt

SEQ ID NO: 1363 - DNA, 286 bp, Homo sapiens
gggagatgcaggatgtagacctcgctgaggtgaagcctttggtggagaaaggggagaccatcaccggcctcctgcaagagtttgatgtccaggagcaggacatcgagactttacatggctctgttcacgtcacgctgtgtgggactcccaagggaaaccggcctgtcatcctcacctaccatgacatcggcatgaaccacaaaacctgctacaaccccctcttcaactacgaggacatgcaggagatcacccagcactttgccgtctgccacgtggacgcccctgg

SEQ ID NO: 1364 - DNA, 503 bp, Homo sapiens
ccatcaggatcatgaaaacaaactttggtgaatgtgagcaactgcgccagacaggacacaggttacagggcctgacgtcactaacggtaactgacaatcttggaatggaccctactgctgatgtttcaaaaggacacagaggtgaactggtcacttctaattaagaagagccagtggggtgggggaagctgaaaaccaaaaatccacgtagacatacgtggcagtgtgaacgtctgtcctccccttccttctcctcacttcctctcctcctcctcactcaggctggtattctcctggtgtgcggatgtcagcttgccctgcagaagggctgccagttttttagatgtctttttgagaaacgagctgcccggatgggcactgttcacgtgcaggtacaggtcctcctgggtggggcccgtgtagccgcaatcctcgcagacgtagagcttgtcccgccgctgcttataggcatactgctgctgcaccccatggattttcttcag

SEQ ID NO: 1365 - DNA, 245 bp, Homo sapiens
ctgggcggctccacgctcatccagtgggcctaggttctgactgaccagcgaacaaaaactgtgacagagatctaggatttcattcaggcagtgaaacacctacccgggaaacagagttggcattaggaaaggaaggaaggtacatccatgaagttaaagtgttaggagaacagtctgattaatagctgatctaattaatagctgacctcccaaatctgacaggatagacactgccacgtgcaagg

SEQ ID NO: 1366 - DNA, 131 bp, Homo sapiens
aaaatccccataaatcttttctgtcctgaggtagttgcaaaataaatcataacttggatatcaactagagctgaggctttgactttttactcattaaaactagttgttacaggaactacctttagatattt

SEQ ID NO: 1367 - DNA, 430 bp, Homo sapiens
ctgtgcagttatatgaccataaaggaaatgaaccattaaaaatggatctacagccatatattctgccgttactcagaggcttaatgatttattttccccctccagccctgcctttaccaggttaaatgacagaagaccttctattgtacctattgttcaaaaaatattactgttctgtggaacctgggagagtccaattgataagagaaactgaatcatactgatgaggtgaaggataggtctgccggtgtggggcagggcactctttctcagcagccaagataacttatcacacacgaagcagagagaatgcacccgatgaaaatctctctgaactgtgttccttgaaggatctcttaaaaaaaaaaaatctgaaacatcatccattgaacaaatgaaaggcttatacctttaccatgaagaaacattt

SEQ ID NO: 1368 - DNA, 294 bp, Homo sapiens
ctgggcggatagcaccgggcatattttggaatggatgaggtctggcaccctgagcagtccagcgaggacttggtcttagttgagcaatttggctaggaggatagtatgcagcacggttctgagtctgtgggatagctgccatgaagtaacctgaaggaggtgctggctggtaggggttgattacagggttgggaacagctcgtacacttgccattctctgcatatactggttagtgaggtgagcctggcgctcttctttgcgctgagctaaagctacatacaatggctttgtgg

SEQ ID NO: 1369 - DNA, 429 bp, Homo sapiens
ctgaaggcaatgggggactgaggaaggaggcagcagaagtaggagaggagcaagaatccagaagggaaatgagaacgacaaaactgaagtgcacttcaacatcctgcagccaaaggggtaaaaaggagaaagaagtgcagaccagtcacataaatgccacagtgacatgcacaaaaacgtgaggggcacactccagggacagagtctgacaacatgacaagctacatggcatcaaactctttcatgtgacaggcagcttttcacatgtgcatcttaagactggaacttgctatagataaaccttaagtagttaataaaagcaaaagtcatcctctattcactgtttgctgccatgttccaggcatagtacttggcactttttattttatttcacttgatcagctcagaaagtcctccaaatgagtattt

SEQ ID NO: 1370 - DNA, 540 bp, Homo sapiens
ccactcccaggatgctgggtctcgcttgctggctgggaccccggagccgtcagtccacgcactcccggatgcactcaacaacctaaggacgcaggagggttccggggatggtccgagctcgtccgtagattggaatcgccctgaagatgtagaccctcaagggatttatgtcatatctgctccttccatctacgctcgggaggtagcgacgccccttttccccccgctacacactgggcgcgctgggcagaggcagcacctgctttttccctacccttcctcgattctgtccgtgaaatgaattgggtagagtctctggaaggttttaagcccattttcagttctaacttactttcatcctattttgcatccctcttatcgttttgagctacctgccatcttctctttgaaaaacctatgggcttgaggaggtcacgatgccgactccgccagagcttttccactgattgtactcagcggggaggcaggggaggcagaggggcagcctctctaatgcttcctactcattttgtttctagg

SEQ ID NO: 1371 - DNA, 142 bp, Homo sapiens
ttaaaatggtagcacaagagtctggcaagttggtactgcagagaaaaggggttaattgaggcttgtttggagtcgggattcccctttcccaaacatgcgtctcgccacttggacagcagccatttgtactcgtatacttttt

SEQ ID NO: 1372 - DNA, 377 bp, Homo sapiens
ccaccatctgtgcaagtagccaaaaccactccttttaacacgagggagcctgtgatgctggcctgctatgtgtggggcttctatccagcagaagtgactatcacgtggaggaagaacgggaagcttgtcatgcctcacagcagtgcgcacaagactgcccagcccaatggagactggacataccagaccctctcccatttagccttaaccccctcttacggggacacttacacctgtgtggtagagcacattggggctcctgagcccatccttcgggactggacacctgggctgtcccccatgcagaccctgaaggtttctgtgtctgcagtgactctgggcctgggcctcatcatcttctctcttggtgtgatcag

SEQ ID NO: 1373 - DNA, 504 bp, Homo sapiens
ccatgctaagtttgggaaccgctggtgatgggacatggatgcttgcaaccgaccgtgggcggatgtggttgaccagatggcagaggacgacaccatccatgagggctgcccccaggtcttcgtgcagactgaccttcaatctcatctcaatgctctcacgaagttgttccaccagctctttctcttctctcatctgctccattttcctccggattgtaaactgcgggtctatagattccaaatttctctgaggtcttagaaacacagactcagaaatcaaatgaggatgtctcagaaaggagtcacttttccagaggcaggctgccccttaactcagccgagcagcaggaaccactggggccaaagctattttatcttccttaggtaaaaaaaaatcaatagaatatttcttccccgcttacatgctcccaccactgatgaacgcgatcttcagcaagaagaactttgagtccctctccgaagccttcagcgtggcctctgcag

SEQ ID NO: 1374 - DNA, 201 bp, Homo sapiens
cctccgtaagatgcttgacaattttgactgttttggagacaaactgtcagatgagtccatcttcagtgcttttttgtcagttgtgggcaagctgcgacgtggggccaagcctgagggcaaggctataatagatgaatttgagcagaagcttcgggcctgtcataccagaggtttggatggaatcaaggagcttgagattgg

SEQ ID NO: 1375 - DNA, 295 bp, Homo sapiens
  misc_feature 12: n = A,T,C or G
ctgtgaggctgnttccaaggaggaaaacaaggaaaaaaatcgatatgtaaacatcttgccttatgaccactctagagtccacctgacaccggttgaaggggttccagattctgattacatcaatgcttcattcatcaacggctaccaagaaaagaacaaattcattgctgcacaaggaccaaaagaagaaacggtgaatgatttctggcggatgatctgggaacaaaacacagccaccatcgtcatggttaccaacctgaaggagagaaaggagtgcaagtgcgcccagtactgg

SEQ ID NO: 1376 - DNA, 318 bp, Homo sapiens
ccagcgctactgtactggcccagggcagagttcatgtatctcgtcttgaccacgtctacaggggaggcgatgacagtggtgcagaagcctgccccaaaggcagaagtgaagtggcaagggaggtcatctgtcatgaggttggctttcaggagggcatccttgatgaggtcataggtcaccagctcagcacagttgacaatggcattacgagcaacattgggggaggtccctttccagaggccccggaacccttcctctcgggcaatggtcttgtaggcattgacggtgctttggtatctccgaccacctccagcccgg

SEQ ID NO: 1377 - DNA, 143 bp, Homo sapiens
gtggattccgytccgggcaccgatctcgccaagatcctgagtgacatgcgaagccaatatgaggtcatggccgagcagaaccggaaggatgctgaagcctggttcaccagccggactgaagaattgaaccgggaggtcgctgg

SEQ ID NO: 1378 - DNA, 98 bp, Homo sapiens
aaatattggtaataggtcggcaacagcaactatagaagtacaactcaatagatggcattaaaacatattgtagtgtggatatatattttttctttttt

SEQ ID NO: 1379 - DNA, 330 bp, Homo sapiens
aaagatgttcacgttacgctggaccaaattaagacggctttctccctcttgctgacgtgccccagccgtgataatgaccagcttggagtttgcagttacattatagtctttgccagagacaatctttggtgttctaaggaaaaggctgccatgttggagatccatcatctctcccttcaatttgtcttcgacgacatcaacaagagcaagttcatctgccaagtccttcattaagatactgatggcacaggccatgccaacagcaccaaccccaacaactgtaatcttattctggggggtctgttcttcctttagaagattataaatcag

SEQ ID NO: 1380 - DNA, 269 bp, Homo sapiens
ccactcctggaaacccactgatagatgagtttcccccattcttctggcctccgccacatgatcaggaagctggacttgctcttatccaaccactcgaggttccctttcttcctcagttcctctaatacaatctggatcgactccacaggaagctttcgctgtagcttgacgttgttgaagagcgggctctcctgagcttccatcaccgtcatgctggactgtttgtgcaggcggcagaaggacaggaccagcgagcaccaggcggccag

SEQ ID NO: 1381 - DNA, 232 bp, Homo sapiens
aaaagagaggaaaggcagtgcagggctggaggtcctggagggtggcggcgggtcgtcctaactagcaggctgaaaggtgctggaggggatgccttcactcagaggaagttcacagccacctgccttggaacatgtacctgttcatcttttcgtaatgttagtattcattttgctatcttcctgttgccatttccaaacagtgtcagtatgtttttgttaaatacgaacattt

SEQ ID NO: 1382 - DNA, 348 bp, Homo sapiens
aaacgtgctaaagggaaaggaatctgacattctgggtaaatcttactcaatctaaatcaaagcttggttttcaggaggaggaaggtgcgagcgcaggcagaggtgctgaatactcctcttctgattcacttccatcatcctctttctcttggtcactgccctcagtgctaagccggtcaaacccttttcgactgtagcccttacggcttgcaaagaaattaccaaggtttaagcctccacttccctttcctctaaatcttcccagtactcttcctgaactcgtctcgagtttgtgttcagaatctccaaaggcccttgattttttccaccgaataaatatggcaatgg

SEQ ID NO: 1383 - DNA, 293 bp, Homo sapiens
  misc_feature 10: n = A,T,C or G
ctgcttcaanacctcagcttcatgggacttgcgtctttcttctgcagcttctaatttcttctgaatttcctccagggaaagatccttcttctttggaggggaaagggggaattctggaacagattcttttgaccgagggctgagaatcagctcaaaagcctggcccgaggcacgcttctccagttctttcacctggatatcagaagaagccatggtgaatagaagacaagcgacaggcagtgtattctgcacaatcaactgggataaggaaagtcctgctcagtccgagccgc

SEQ ID NO: 1384 - DNA, 573 bp, Homo sapiens
ctgaagcaacttgggattaattgcttgattagcttcacgaagcacagagataaggtcgctcacttgctttatgttattaggtgtaaagaaagtgtatgctgtgcctgttttggtactgcgagcagttcttccaattcgatgaatataatcctctgaggagttagggtagtcataattgatgacaaatttcacatcttccacatctagccctctggaggccacatctgtagcaatcagaataggagcttttccatgtttgaattcatttagaacccagtcacgctcttgttgactcttgtcaccatggatacccatggcaggccacccatctctcctcatttttctggtaagctcatcacatcttcttttggtttccacaaaaacaatggttttattctccttctcactcatgatctcttccattagacgaataagtttttcatccttttctacgtcatgacacacatccacaatctgaagaatgttgtggtttgcactcagttcaagtgcaccaatgtttatatgaatatagtctttcaggaaatcttcagcaagctgtcttacttcttttgg

SEQ ID NO: 1385 - DNA, 150 bp, Homo sapiens
ccaaggccgctagggtccttacccctcaggatcactccccagccctttcctcaggaggtaccgctctccaaggtgtgctagcagtgggccctgcccaacttcaggcagaacagggaggcccagagattacagatcccctcctgtaagtgg

SEQ ID NO: 1386 - DNA, 159 bp, Homo sapiens
  misc_feature 139: n = A,T,C or G
aaatgatgttttggttaagagtggaccatgagaattagctgacagcatcccctttctctctccctgccttggtgggaccctccctgtgtgaccttggtcaagtcctcgaacttttgtcccgtatttaagatggagctgntttacctacttcataagaca

SEQ ID NO: 1387 - DNA, 735 bp, Homo sapiens
  misc_feature 5, 20, 41: n = A,T,C or G
ggtgnaattcgcctttgaanggccgccgggcaggtcctttntgtstgctgaaggcagatcgcttgttccacaccagctaccactcccaggcagtgcatatccgccctgtttgcagaaatgcacgctgtactagcatctcctgggagctgaggcagaccctgtcagttgtatttgatgccttcatcacggggcagggaaagaaagactggtccctcttccggatgttctcccgaaccctcacggagccctgccccctggcttcagagagccgagtctatgtggacatcaccacctacaaccaggacaacgagacattagaggtgcacccacccccgaccactacatatcaggacgtcatcctaggcactcggaagacctatgccatctatgacttgcttgacaccgccatgatcaacaactctcgaaacctcaacatccagctcaagtggaagagacccccagagaatgaggcccccccagtgccctttctgcatgcccagcggtacgtgagtggctatgggctgcagaagggggagctgagcacactgctgtacaacacccacccataccgggccttcccggtgctgctgctggacaccgtaccctggtatctgcggctgtatgtgcacaccctcaccatcacctccaagggcaaggagaacaaaccaagttacatccactaccagcctgcccaggaccggctgcaaccccacctcctggagatgctgattcaga

SEQ ID NO: 1388 - DNA, 369 bp, Homo sapiens
ctggggacagcctacaggggcctccagcctgtgccagacgaggaggtgattgagctgtatgggggtacccagcacatcccactataccagatgagtggcttctatggcaagggtccctccattaagcagttcatggacatcttctcgctaccggagatggctctgctgtcctgtgtggtggactactttctgggccacagcctggagtttgaccaagcacatctctacaaggacgtgacggacgccatccgagacgtgcatgtgaagggcctcatgtaccagtggatcgagcaggacatggagaagtacatcctgagaggggatgagacgtttgctgtcctgagccgcctggtggcccatgggaaacag

SEQ ID NO: 1389 - DNA, 322 bp, Homo sapiens
aaagatgtttctggcattttctttttatttgtaaggtggtggtaactatggttattggctagaaatcctgagttttcaactgtatatatctatagtttgtaaaaagaacaaaacaaccgagacaaacccttgatgctccttgctcggcgttgaggctgtggggaagatgccttttgggagaggctgtagctcagggcgtgcactgtgaggctggacctgttgactctgcagggggcatccatttagcttcaggttgtcttgtttctgtatatagtgacatagcattctgccgccatcttagctgtggacaaaggggggtcag

SEQ ID NO: 1390 - DNA, 450 bp, Homo sapiens
aaatattagwtgagactttacaggcacataactgttcagatagaaacaaacataacagactaaaatactttcaaaattaaagccatctagaaaatggaagtaactgaaactgtagccattacaattctttttctggttttgagcaaaaattttatctctctggcaaaacacctttgtctgatcatttgagagacagggttcttgtatactgtttcttcaacgtaaacctcatttacaaaaatagtgacatagcattatgaataaactatgaattggggaccatggaaatgcactagaacaaattttgtaaaaatatggcagatatggaagttaaaaatagaatggatgcaaggactgtactaaaggtgtttggtgtagttacaatgttcactttgcacaactatccctatagtctaggtagccattgggtttctcctcagcagtgtcaga

SEQ ID NO: 1391 - DNA, 304 bp, Homo sapiens
aaaaaatcataaatggggtttcataatccaaagttgaaacatttattcttcatagcttcagaatttaacaaccaattgtagaccatgctttccaaatccagtcttctttgctatttttcaaaacttctgagatctagtattaaactgctccattctaaatgtatagttttagataagtattgtacacttgttgataagggttttctgaaagcagtctatcaaatataaagaatggtttctatctaagaatcagcagtgagggaagaaatattaaacacctatcaagaaatcaattattcatttt

SEQ ID NO: 1392 - DNA, 140 bp, Homo sapiens
ctggaagaagaactgagacagcagaaagaagcagcttgtttcaaggctcgtccaaacaccgtcatctctcaggagccctttgttcccaagaaagagaagaaatcagttgctgagggcctttctggttctctagttcagga

SEQ ID NO: 1393 - DNA, 166 bp, Homo sapiens
aaaactttgtttttcttaaaagcttacagtgtttggctaattctcctcccctttttacaagacgggggccggagggtggacactggtggcaggttaagggatactgtcactttaagaagcctgcagattgaagtgtaaacatggagaaattaggggctgatttttt

SEQ ID NO: 1394 - DNA, 543 bp, Homo sapiens
gcagaggctgtggtacaacatggtccttggtgaagacctgcacccctggaacctcccaccatcatcacaactgtagtctcatttgcagtggagaaaagaacccgacgtcccacagccagatatacacccagctccatgccagcccttcatgtttaccttttgctttgttaattacatgtcagactcctagagggcctccagactaataggaagcatttctgtaaccaacctgccacccactgattcagaaatggaaatcacattccacaatctatggcttctaccagctagcccaggaaatacttgaaatcagcattccaattagtgttgagtctcttgattgtgtcatttaccaattaaataactgagacctaagtctgggaacagagccacgaatctgcctttgagatgctggcagatctcaaggccatcaattattgggggagggagggacaaacactcccaatcatccaccagtcagactgaatgtgtagctggcgaggaattacttccacttctggcccagcacaagccctgctttgg

SEQ ID NO: 1395 - DNA, 364 bp, Homo sapiens
cctatcatcagtggggttgtattcaccatcatccagggtaccatcttcatacaaggtactagctatgaccaaccgaaacttgtcacccaagtctacagggtaaatttgaatgtttacatctaagattagatccatcttgaaagattcactctcacaatgcagtcgagacactcggtcaaacttcttgccctccgggtcaatatccttcacatcgaaaatatcctcaaacaggatgcccgccatcgcgagggggccacgagagcagcagaaggggtgagagcgcgaccacagttgggagtacgtgcaccccctagcgtggacaagaccggagagaaccaaaagcacctcctgaaagcgcggcggc

SEQ ID NO: 1396 - DNA, 422 bp, Homo sapiens
gctgctgctgctattgtgtggatgccgcgcgtgtcttctcttctttccagagatggctaacaggggcccgagctatggcttaagccgagaggtgcaggagaagatcgagcagaagtatgatgcggacctggagaacaagctggtggactggatcatcctgcagtgcgccgaggacatagagcacccgccccccggcagggcccattttcagaaatggttaatggacgggacggtcctgtgcaagctgataaatagtttatacccaccaggacaagagcccatacccaagatctcagagtcaaagatggcttttaagcagatggagcaaatctcccagttcctaaaagctgcggagacctatggtgtcagaaccaccgacatctttcagacggtggatctatgggaagggaaggacatggcag

SEQ ID NO: 1397 - DNA, 653 bp, Homo sapiens
ctgacctgctatcccaccccaaatttcagcctgaggtatatttcagtgaaggcaggtagctgtgcttctcagagcagagaagcagttttaagagcaaaaaggtagaggaaatctagaaaagaaccgtcttgatacagatttatcccatggtgtgaagggagggcaaagaacccagtggcacttcgcttatccagcaatttctgtcactgtggtgaccaacttctgcccgttccatagggtcttgaactgctcaggaactgggaattcattaaagtcaccgccttctgtaggaatgaggacattcatctcggaagatttggcactgactatttcacaatccagggaattcttgctcaggtaagcatggcagccatctgttttgttgatggatatggttggcactttacccattacctgaactttgacatccttactgttgattatctccacaatgcccaccacgtcatcgaataccaggccaagtttcttacagttatctactgtaatggagttaattttgcccttgatttgcaatgtcgtgttgacacacttgtatatgtaagccacctgtttcagctctgtgtcctcaatcaccagggtggaaacattttcctgattttccctctcccttcttgccttcagttcaagtacag

SEQ ID NO: 1398 - DNA, 261 bp, Homo sapiens
aaaattataactactcattctttctttagccttagataatttgagcagaagccacaacaagcaaaccacaataaatttagaattggcagaaatccacattaactcctcttcccaagtttccacactactaccatttacagttgtaggtttgtaatgtataattatgtaatgcasaaactagctttgacttgtgtracgatgcactgtcaaaggaagcaaagtaagaattgaaattccacattcccagaatttaacactcag

SEQ ID NO: 1399 - DNA, 195 bp, Homo sapiens
ctgattttatttccttctcaaaaaaagttatttacagaaggtatatatcaacaatctgacaggcagtgaacttgacatgattagctggcatgattttttcttttttttcccccaaacattgtttttgtggccttgaattttaagacaaatattctacacggcatattgcacaggatggatggcaaaaaaaagttt

SEQ ID NO: 1400 - DNA, 120 bp, Homo sapiens
ctgcctccaaccctttgggtctccaccacccaagtttcctgtagggtccgccgggtccaggatcacaggcctgggtttcgtgagctgccttctcaggtacttttcaataatggggttttt

SEQ ID NO: 1401 - DNA, 284 bp, Homo sapiens
ctgtagccaaaaagatgctggggcagattgtggacaagtagaagcacctccttcccctctgcgacattgaacggcgtggattcaatagtgagcttggcagtggtgggcgggttccagaaggttagaagtgaggctgtgagcaggagcctctgccaggggacatgcaatctgcagggaggggctgaggggggtcccatggtctctgctgtcttctctgtccacctctttgtagaggagcttgagctccaggaatgctctggtcagggctgctgtgactgttggcc

SEQ ID NO: 1402 - DNA, 198 bp, Homo sapiens
ccaggtttctgctggtaccaggctaagtagctggtgctggcgggaacactgtgactggccctgcaggagagggtggctctttcccccggagacagagacagcgtgtctggagactgtgtcacttcaagctctgcgatgccatctgggagccagagtagcaggaggaagagaagctgcgctggggtttccatggttccc

SEQ ID NO: 1403 - DNA, 441 bp, Homo sapiens
aaactcaaaattgacaaattaactagcttgctttttgtcatttggaagactaccattattcaaatttattatgtaatacactcatccagataatgaaacatctgcgaaaaaaagtgtgggaatcacctcatctgtgcataaaatggctattatacatgaatgcagacgtttgaagttagaaaggaatataactcaaatagcaaaaggtcctaattacagagtttacaaataagcagttttattttcaaaagtacatagtaagtccagactgggctattgccaaagaactaatctttagtctacttcaacatgttacatggtattcctgactctacagactatcagcatctgtggaggttagctcctaaaggtcccaaagaacaggaaacatgcaggaataaaggactcctcatgaagagcaggtgggagcgagtgggcagg

SEQ ID NO: 1404 - DNA, 243 bp, Homo sapiens
tgaaggggttcttggaagacctggcacctccagagcgcagcagcctaattcaggattgggaaacatctgggcttgtttacctggactatattagagtcattgaaatgctccgccatatacagcaggtggattgctcaggtaatgacctggagcagttacacatcaaagtgacttcactgtgcagtcggatagagcagattcagtgttacagtgctaaagatcgcctggctcagtcagacatgg

SEQ ID NO: 1405 - DNA, 168 bp, Homo sapiens
aaaccactggatctatctaaatgccgatttgagttcgcgacactatgtactgcgtttttcattcttgtatttgactatttaatcctttctacttgtcgctaaatataattgttttagtcttatggcatgatgatagcatatgtgttcaggtttatagctgttgtgttt

SEQ ID NO: 1406 - DNA, 486 bp, Homo sapiens
ctggacatacagaaattgttgaatttttgttgcaacttggagtgccagtgaatgataaagacgatgcaggttggtctcctcttcatattgcggcttctgctggccgggatgagattgtaaaagcccttctgggaaaaggtgctcaagtgaatgctgtcaatcaaaatggctgtactcccttacattatgcagcttcgaaaaacaggcatgagatcgctgtcatgttactggaaggcggggctaatccagatgctaaggaccattatgaggctacagcaatgcaccgggcagcagccaagggtaacttgaagatgattcatatccttctgtactacaaagcatccacaaacatccaagacactgagggtaacactcctctacacttagcctgtgatgaggagagagtggaagaagcaaaactgctggtgtcccaaggagcaagtatttacattgagaataaagaagaaaagacacccctgcaagtgg

SEQ ID NO: 1407 - DNA, 560 bp, Homo sapiens
aaatatatgcttttctagaatttgatgtttgaccatttatgacttaattaccagagagccagtaaattaggacagtgtttcaacaagcctaggctatctcgtaagttgaaaaatatcccactatagttgcttcatgagtatgaagtaagatggcctctgatttacactggttcaatttacaaattttcaactttatgataggtttatcagggtactaaatgcatttcaacttgatagtttcaacttatgataggtttaccaggatgtagtcccactgttgaggagcatctatttaggagttaattactttagtaataagtggaaagtaagataccttgagtaatgtttgcctataaaattgtcagcgtatttttacactattggctcaagaatgttataatgctaagggacataagttggcaaccacttggtttttggaaggactttcggtattgtattagaagtctgccctagctgttaaatttctgggtatttatcctaaggaattaattaaagagttaattgttcctttcttcagtgggccattgttttagatattt

SEQ ID NO: 1408 - DNA, 360 bp, Homo sapiens
ctgcctagttgtagttgacagacaactttataagctctagtcaaccctattgactaagcttctgaaccactagcatagttctagggtcaggcggatgcctactgtgggcaggaaagtgatgcatgcatgtgtgggagcagtgtcttaatgtctgaaatagtagccatgagctacatgtggctatggagcacttgaaatgtgggagtccaaattatcatgtgctgtgagtgtaaaataatatgtttctaagaccgtgtgtgaaagaatataaaatatctcattaaaaaatgtttatattgagtacatgttgaaataattttatatttgtgacacattgtgttaaataaaatattaaaattt

SEQ ID NO: 1409 - DNA, 208 bp, Homo sapiens
ccagtccaacctgctcctcattattgtataaatgagcagaatcaatatggcggaagccagcttcaattgccaatttggtggcctctaaagctttacttttaggaacctctgcaggcgcataggtgccaaatcccaggacaggcatgaagtgaccatcattcagcttcacacactgatatttcgaatccatttctgtcactagcctggc

SEQ ID NO: 1410 - DNA, 404 bp, Homo sapiens
aaaaaaaggaaaaagttttattacgaaactagtttgtataaaacagggttatacatatttttgtaagtttgtaataaaacagtaagaaaaaaaaggcagtaatagaaatctccaaaaggcaacctatcaaaaccaactggctgccactttgagtttggacagtagctgcataaactttgttcttcttgarcagtatttaataacatcattaatacattaacaacatttctataaagtaagacacattggtgctgaagtacaactggtggcctcttgatctcacctatgaggagagttctttacamawccacatagggaaaattgcagttgtaaggtgarctacacatctaaaatatgcagaggtaatagcattacatgttaaagtatcaagatatacacatttt

SEQ ID NO: 1411 - DNA, 623 bp, Homo sapiens
  misc_feature 428, 469: n = A,T,C or G
ccacttgttgagatatggggagcctacactccggagggstgtacctttagcactggccctcatctctgtttcaaatccacgactcaacatcctggataccctaagcaaattctctcatgatgctgatccagaagtttcctataactccatttttgccatgggcatggtgggcagtggtaccaataatgcccgtctggctgcaatgctgcgccagttagctcaatatcatgccaaggacccaaacaacctcttcatggtgcgcttggcacagggcctgacacatttagggaagggcacccttaccctctgcccctaccacagcgaccggcagcttatgagccaggtggccgtggctggactgctcactgtgcttgtctctttcctggatgttcgaaacattattctaggcaaatcacactatgtattgnatgggctggtggctgccatgcagccccgaatgctggttacngtttgatgaggagctgcggccattgccagtgtctgtccgtgtgggccaggcagtggatgtggtgggccaggctggcaagcccgaaaactatcacagggttccagacgcatacaaccccagtgttggtgggcccacggggaacgggcagaattgg

SEQ ID NO: 1412 - DNA, 171 bp, Homo sapiens
gcggcgctgggggtgctggagtccgacctgccaagtgccgtgacacttctgaaaaatctccaggagcaagtgatggctgtaactgcacaagtgaaatcactgacacaaaaagttcaagctggtgcctatcctacagaaaagggtctcagcttcttggaagtgaaagaccag

SEQ ID NO: 1413 - DNA, 189 bp, Homo sapiens
aaaagtcataagggttttattttgtatcatcaaaatattctataaggtcccaaatactctttttcaacccatgaacagtaagaatttgtgaattctgataatgaaaaaagttttcctccaggtatgtttgtttcacattcagtcctaaagccttgagctatgtgtacttccctcacacaggaacaccag

SEQ ID NO: 1414 - DNA, 564 bp, Homo sapiens
  misc_feature 511: n = A,T,C or G
cctccccagcgcccaaaggtctattacaagtacctatagacttttcacatataagttctagtgggtacaagctttttttttttttttttttttttttttttctattgggkatttcattcattttggggggggaacaaattctacaaactgctttaatattgkcctttttttctaatattcacattaactttttatgtaaaacataccaatgcttttaataaagcttacataggaataaactattatagacctgcatagatataagtacccatgtattaatctacattaaaataatggattttattctgcgaaractccaagttgctcctgggkgctaagkgaagcacttagggaaatgtgttcagtctttgaggtcataggaacattarattatatcaaaggaaacctggagccatcagctaagtggcccttctgtcctgtagatacataaaaactaatgggctccgctatgcggctcactttctgctattagatactatgaggcactaanaaaaaactactgcctgcatcatatctttcttcggtttgagataaagagaatgg

SEQ ID NO: 1415 - DNA, 231 bp, Homo sapiens
ctgcgcttggataacaagtaattcaacgcacgcacttaacagaaatgttaaactataacaagcaccatttgaggattaacaggaacatttttttgaagatttcaaacgaactcgactttcagtataattgtacctaaagtatttataaacagctcatcggagcctctatttgtcatagacttttgagttgattgttgggaccacataataggaccatttttttttgtcttt

SEQ ID NO: 1416 - DNA, 540 bp, Homo sapiens
cttgatttaggatctgtggtgcagggcaatgtttcaaagtttagtcacagcttaaaaacattcagtgtgactttaatattataaaatgatttcccatgccataattyttctgtctattaaatgggacaagtgtaaagcatgcaaaagttagagatctgttatataacatttgttttgtgatttgaactcctaggaaaaatatgatttcataaatgtaaaatgcacagaaatgcatgcaatacttataagacttaaaaattgtgtttacagatggtttatttgtgcatatttttactactgcttttcctaaatgcatactgtatataattctgtgtatttgataaatatttcttcctacattatatttttagaatatttcagaaatatacatttatgtctttatattgtaataaatatgtacatatctaggtatatgctttctctctgctgtgaaattatttttagaattataaattcacatgtcttgtcagatttcatctgtataccttcaaattctctgaaagtaaaaataaaagtttt

SEQ ID NO: 1417 - DNA, 350 bp, Homo sapiens
  misc_feature 3: n = A,T,C or G
ttnatcatctaactgtgggatctatttcatttctggaaataacacaacttagttctagggctttcatgcacatgaaatataaaacagcttagttgttctgaaaacatgacaatggttaattttattcaagtcccaacactgagttcagagcacttctccataggccccattaatctctccaggtttctgggagtatcattaaatccctcggcatccttaagaagcaggtgcttagcaaacatccagtttccaaatgagagtcagaggggcttgatcctgaaagtgtagtattttcctgccttgtcctactggtatagcttcttggacctaaaatctctctcctgctgagg

SEQ ID NO: 1418 - DNA, 425 bp, Homo sapiens
tgctaggcagccttattttcataacccawttagggaaaggaaatttaggattttcaaggctacattaatttttcctccatcaaatcttgatttgttcttgataaaaatgagttcttttggggaaattctttctttagacaccaacttggtttttctcatcttccacagaataattgaacccctgacctctagatgttcaaaattccgcttcaagcctctgtcagataaaattcaacagcagcgattactagacattgccaagaaggaaaatgtcaaaattagtgatgagggaatagcttatcttgttaaagtgtcagaaggagacttaagaaaagccattacatttcttcaaagcgctactcgattaacaggtggaaaggagatcacagagaaagtgattacagacattgccggggtaataccag

SEQ ID NO: 1419 - DNA, 390 bp, Homo sapiens
aaactcttgctattgaattgagatgattaaaatggtgacttaatccgtagttattttgcacccactgaaaggaaagtgctttccagaataatatgaagtatctaaaagtgtcaccttttcttgcctgatcaacaatttgggcttcctgtttgtacaaggggccatttggcatacctttcacagcttttatcaggccaagttaaaggctgactacattttttcatcatgaggaaagcagttgaaatgaggcatgagttactgtgcattgggattttagaacaattttcttgtgacagctctttttgtgaagttaggttcttaaaagtgcccatgatggtcacttaaaatgtgcagtaatagcactgccaggatcaagcatgaaaggctttt

SEQ ID NO: 1420 - DNA, 480 bp, Homo sapiens
  misc_feature 322: n = A,T,C or G
ttgctgaacaatgacatcgttttctccaggggttgaaatccatgtccatggctgacaacccaacaaggctgggacccaaattcgtacagagatgaggcagagtggagagaaacaactctggctgagccagagtctccagccactacttcttattcctgggctttagctcttcggctgcattacgcaggaaaatgtaattttttttctggggattataaaattcatgtccctttgaccagtcgtagctggaagcgtatgcaaatatgtttccattgygattgaaacagcaagctgasatgggctgayctaactgttccgaagnttttagttttgktctggcatctttgycccagaagctgaatctaccatcagatcccacagttgcaagggtgccatgaacaggatggaacgccgattccatttacccgcataaatgycctgaggagctgaagtgttggttccattagatcgatgacattt

SEQ ID NO: 1421 - DNA, 453 bp, Homo sapiens
aaactgattgaggtcacagtattttattatttggggtcctcaccacaggaaacactgcgatacaggggcaaaagagatggcagtgccaattaaattaatacaacaaaatcaatgcagcaccaaccaagactgccaggtctggtgtcatgggtatgcccagagcccaggagttcagaagggccctaagcctgatttaatgctctgctgttgatgtcttgaaattcttaacaatttttgaacaaggggcctgcgttttcacttcgcactgggccttgcaaattacatagcgagtgctcataaaagaactcagaaacgtggtacctctcttcctggtggatacaaataaagaaatctggatccaaagttgaaagttgctggcgatatcattcaagtaggactctaaatagtggattaagatgagggtgggcctgggtgaagattctttccagcttt

SEQ ID NO: 1422 - DNA, 542 bp, Homo sapiens
  misc_feature 4, 151, 166, 220, 231, 308, 349, 364, 511, 528, 537: n = A,T,C or G
tttncttgaccactatacggcacaacctaggggstgtawaaaacctascrcaatgcagaagggtgaagcttcatgacaattggtctcggcaataatttgggggatgtaacatcaacgaatcagacaacaaaagcaagggaatacacatggnactaaatcagtgtgnggaaaaatatcccaaacaggcaaagcacaacatggamtagatatatgcacattnatggaccctgnaggcakkactcacaaacatactacctgggaagcamctggacctttaagggatgaggtagattcaacaaacagggcancgtatmttccactgggatagcattccagccttaaaaataangaaatcttgaaaagnactacaataaggacaaatctcgaacacattctgttaagtaaaacaagacaagccaaaaagggaaaactgtataattacacctatgtaaaatatttagtcaaactcaaagaaaccaagtgttgtagtctcagcagggcaccaagatgnaaacagtctctcatagnctgagatangcatc

SEQ ID NO: 1423 - DNA, 252 bp, Homo sapiens
ttaatgccaaatggcaaagttgcatccgtggaaatggttaaatatcatcactgtcgggatgaacccctgcacgccctctatgacaatgtggagaaactctttccaggttttgagatagaaactgtgaagaacaacctcaggatcctttttaataatgctgtaaagaaacgtttgatgacagacagaaggattggctgccttttatcagggggcttggactccagcttggttgctgccactctgttgaagcag

SEQ ID NO: 1424 - DNA, 273 bp, Homo sapiens
tttccactctgcacattgtagagggaacactctgtaggcccatgggtcccttactagagaggttgagtgaatttgccttcagttaacatgggaccttctgtttagcttcctcttgcttcccaaagattttaagcattttgtaaatgtataaactcacctctggtaacagtggcccagacgctgctttgtgctaaaagcatgggaaatgtaaaggcagtctttctctgggaaatggatgctattctattctgctgcccctacctgttcctgagg

SEQ ID NO: 1425 - DNA, 618 bp, Homo sapiens
aaaaaccttgtatagcaaaataacttaaaaccctttgtgatatcatcttaccagtttatttggtaaaaacaaacagttatttggtatttgtcagaattcttcagtgcctgctattacagctattttccaattactaatttgattatactcactcaaggcagtgcaagatcttgaagtactttttagcagttaagtaatattgaattgtattgaatagtttacatagtttattctagtctttgaaaattactgaacatggacaatgtgcatgtcattgacatctgccttagaacttctgggacaatcctgattcgagagattctatcccattatttacatataccaaaaatactttgttaatttaatgtgttggcttcccaactcctgaacacgacacaattttattattagattttgtatggtgattttaggctatgaaaacatgatcattatatgtatatagatacatttttatttgttacaaatgtttgagcagctcactagcccacccctcctctattttgggtaagagaatttactaccttttttaactatgtagttgagagcaacatgtattttgttatttttagaatggtcagtatattgctataaaatttt

SEQ ID NO: 1426 - DNA, 565 bp, Homo sapiens
gtggtagaaagagatgacggaagcacattaatggaaatagatggcgataaaggcaaacaaggcggtcccacctactacatagatactaatgctctgcgtgttccgagggagaatatggaggccatttcacctctaaaaaatgggatggttgaagactgggatagtttccaagctattttggatcatacctacaaaatgcatgtcaaatcagaagccagtctccatcctgttctcatgtcagaggcaccgtggaatactagagcaaagagagagaaactgacagagttaatgtttgaacactacaacatccctgccttcttcctttgcaaaactgcagttttgacagcatttgctaatggtcgttctactgggctgattttggacagtggagccactcataccactgcaattccagtccacgatggctatgtccttcaacaaggcattgtgaaatcccctcttgctggagactttattactatgcagtgcagagaactcttccaagaaatgaatattgaattggttcctccatatatgattgcatcaaaagaagctgttcgtgaag

SEQ ID NO: 1427 - DNA, 144 bp, Homo sapiens
ccactagttatttttatgtaatcaattacggggtcattagttcatatcccatatatggagttccgcgttacataacttacggtaaatggccgccaccgcggtggagctccagcttttgttccctttagtgagggttaattgcgc

SEQ ID NO: 1428 - DNA, 214 bp, Homo sapiens
ccactagttattattatgtaatcaattacggggtcattagttcatagcccatatatggagttccgcgttacataacttacggtaaatggcccgcctggctgaccgcccaacgacccccgcccattgacgtcaataatgacgtatgttcccatagtaacgccgccaccgcggtggagctccagcttttgttccctttagtgagggttaattgcgc

SEQ ID NO: 1429 - DNA, 253 bp, Homo sapiens
  misc_feature 12, 16: n = A,T,C or G
ccactagtccantttngtggaattctgaagccttaattgcttatatccatgtttctagtgaaatgagagggtataacaaaaaagagaacaggaggaaagcttcgctgtgcctgaggaaataatctagtcaaggcagcaagtctggatagtgctatagagatgagatacctgagcagttccagaggaagaggtggagatcagaggccagttttcagtgaacactgtaaagaaaagccagatgatgtgtcctgga

SEQ ID NO: 1430 - DNA, 232 bp, Homo sapiens
aaattttactagtgttacttaatgtatattctaaaaagagaatgcagtaactaatgccctaaatgtttgatctctgtttgtcattactttttcaaaattatttttttctgtaaagtataatatataaaacttcttgcttaaattgaatttctatattagtggttaattgcagtttattaaagggatcattatcagtaatttcatagcaactgttctagtgttttgtgttttt

SEQ ID NO: 1431 - DNA, 734 bp, Homo sapiens
cattatacaacactatattgccaggtcaaagagggcagggacgtaaatgtacactaaaatgcmaatgtatcccaaagagataaaacaaattccatttacagcatgaaggtttacaaatgtacacctgtacaaccaaggaaagcatcactactaaattagcaaggcttttataataaacattgaaasaagatttcctttcaaagtgtaaacttacatctattactacacacacaatgcatatatttatagaaagcaaaaagagctatctgaatatgtaatcatgcttaaatgctgagctatcaaattcacttttcagtggccccttttcatctctatctggttcctactttctgcctctatgaaaaagcaaaataaagctcaacacttcctcaacatgtctgtaattctataagcaaaacaaaatacaaatttccactctttctcattgcaaaccaaactgaaaagttaataagtgacttaacttttcatttagtgcacttaattggaagtgtcaccatgattttgtatttaactcttacaacaattacatatgtaagtatatacaatatttctgtacattgccagagacattttagggcagtaattgtattaaaaccacatctactgtaaataatgttaggttcttttcatctcaaaccactttattcttgcctacttactcgttatttgcatgatagtttgtgaattatcaaaatacaacttaactctttaaa

SEQ ID NO: 1432 - DNA, 542 bp, Homo sapiens
tttaagaaagagcctttgagaaacatgcatacttttctcttttctcctatattcaatactcatatagcctaaaagatggaaactggttcaagaatttaaatgacttgttccctaaaaagttaatctcctcacctttgtgaaatatatcaagtgctttctataaataagggcaggaaatgctaacttcataagcatagtcctagtcattaaaataatttgatcatcttctaaaatttaagtatgatagtaacacagtaatatggaaaatctcaatatacttaacacttcctaaacagcacaatgaaatgttgttcaaggtctgaattaatttgctacaggacctaagcaagtctgtttgcttatcttttggctttaaaattctttaagtctaaaatggtgataattttagaataaactgacaatgtggggaacaaacttaaattcacaaacactacccatatgctcaaaaactctctgggataattagtttcttcattgtaactattgatgtactattatttcatctttccattagctctact

SEQ ID NO: 1433 - DNA, 175 bp, Homo sapiens
ttaaattgattcaaaaaaacttgacacctgtcatgtaggccacaaaatagtagcgaactatactaagtggtatagcccactgtggagtgtggtcttttactcttccaaatagcccaagttggcaaaggttacttaaaaacctgccccccaaaaagctaacttttggtagattttt

SEQ ID NO: 1434 - DNA, 90 bp, Homo sapiens
ttaatcactattgatggaagcttatattccttatgaatatatacatgtatgcatatatacatctctgtatgaatcactcaaagcaatttt

SEQ ID NO: 1435 - DNA, 153 bp, Homo sapiens
tttacctttgtgctttgaaggttctaccatttakaaagtaaaaagccaacccacagaatggaagaaaagaggacagactctaacaagcgttcacaaagatggagagaaattgtaaccctcatatattgctggtagaattgtagaaagatgcag

SEQ ID NO: 1436 - DNA, 483 bp, Homo sapiens
  misc_feature 36: n = A,T,C or G
tttttagtttaaagaagagttttgccacttaracangggagctwtgtctggaaaatacactgagttgaaacacttcatccttggaaggattatataagatgaacagytgtgataaatgtgtagattagagggatgtgaatgggcagttagtccagtgccctcatttaagaggccaagatcctgattcagaggaggcatcctttgcccagagctgcttagctaatctgaccaaatgttgggaaaaatgtctcacctaacccactattccttaattatggattttgtgaaaaacaatagaacatgttaatgagtaatttatattagttcgatgtattacaattttttagctttaaattacagytttcttataatgttgaaatgttttagaatcctttgaatctaagtatttgtttcctaaatgaaacatttgtacaacatttgatgtttttacttatgaaatattctcctcccccaagaaaattt

SEQ ID NO: 1437 - DNA, 171 bp, Homo sapiens
ttttgccacctcaagaagccattttcttgtctgtttccttctttacctacccctacaacctatgaacaaataccataacttaaaaatttaggtagtctacaactcctacaaattttaagttcagagactacccaaagaactgtggaagatgcagcaatataaaagtttttt

SEQ ID NO: 1438 - DNA, 408 bp, Homo sapiens
tctgagtggaggtaggctaacaacacattttgactttstcctcaaaggatagctttgaaaaacaagtgtaaccaattgttacaccaaattaaaatggcaatattaaatcggtaacaaaacgatccacattttatacaatattgtatttccaaacatacataggtcatgaaaatcagagaacctaatatagcaccgttgaaaccattcattatccttcatgtgtgtatgcaattcagaatttcggcagaagacaacaaatggaaaatgcctttcgtttctataaatcattttggatttcaattaaatctttgccttagtaaagggtattcttatctcaagatcaattagccgtttttagctccaccgttttggaagtaaaaatgatgagctacatctactttttaattt

SEQ ID NO: 1439 - DNA, 168 bp, Homo sapiens
ttacacaacagctataaacctgaacacatatgctatcatcatgccataagactaaaacaattatatttagcgacaagtagaaaggattaaatagtcaaatacaagaatgaaaaacgcagtacatagtgtcgcgaactcaaatcggcatttagatagatccagtggttt

SEQ ID NO: 1440 - DNA, 307 bp, Homo sapiens
tttcacatacgaagaaatcaactgtgattatgaagtgacagccagctaaatatgtcttgtattttctctcttcctttttttgcctaactcatcctttacttccattcctgcttccatggtaatgcaggctcaaataaattactaggatacaagattacttcaagcctcttttctgtggaactcataatatgataagcatttgttacaagattgcctgtagttgtttaggggacaaattatattagggaaagaaagtctttctttagttggttaaattttctattataattgggtactaaatttattt

SEQ ID NO: 1441 - DNA, 684 bp, Homo sapiens
  misc_feature 600: n = A,T,C or G
ttaagttctggagtgttcacttctgagcctgaattccctcccctgcaaaatgggggaataccctcctcagagggtccctgcgagggtgaggggagattcagcatggcaggtgtgctgggcacggcagggcctgggaagggcagatcctttccccatccctgccacaaacaacccaaacctttaaaggagagcaatggccttgtgtcaaaaacaaaaacaaaacaaaaccctgtcctaggagactggggccctaatttctaatagcaagcctttatgagtccctaacactctactgggctgagtatctcacacgccagaggataacctgccttctgctcaccaccaccccgtagtagttgtcattgtgtccatttcacagatgaggcaaaggctcagaagagtcatgtgttaaaccagcttctagagcccatgcaggagctgcaggtgggagaatcacctctaggtgctcttcccatagaatcctcacctcctgagtgtcactcactcagcttccaatgggtgtgtgacctttgaccagctttcttcctctctgggcctcagtttcccacctggacaaagtaagaggtctcttggcttcangtaagttcttcctaaacttctttttccttttcatttgagcatcctcttcatttttgccacctctctgtcatttacaggcttttt

SEQ ID NO: 1442 - DNA, 166 bp, Homo sapiens
aaaaaatcagcccctaatttctccatgtttacacttcaatctgcaggcttcttaaagtgacagtatcccttaacctgccaccagtgtccaccctccggcccccgtcttgtaaaaaggggaggagaattagccaaacactgtaagcttttaagaagaacaaagtttt

SEQ ID NO: 1443 - DNA, 194 bp, Homo sapiens
tttgccctgtcaaaagaagagctaaagacagttatataaaaattaaggtgggctttcagactggctaacacaacaacattccatgagtagatggtaatttatttttgtttatccatttcgttgggagcaaggacaaaaatgtaaatctacaccttgcttatcaaaattgccgaaaaaagaatgctctgcctttt

SEQ ID NO: 1444 - DNA, 96 bp, Homo sapiens
gagagtcgagagtgggagaagagcggagcgtgtgagcagtactgcggcctcctctcctctcctaacctcgctctcgcggcctacctttacccgccc

SEQ ID NO: 1445 - DNA, 365 bp, Homo sapiens
gggatgagctgaccaagaaccaggtcagcctgacctgcctggtcaaaggcttctatcccagcgacatcgccgtggagtgggagagcaatgggcagccggagaacaactacaagaccacgcctcccgtgctggactccgacggctccttcttcctctacagcaagctcaccgtggacaggagcaggtggcagcaggggaacgtcttctcatgctccgtgatgcatgagggtctgcacaaccactacacgcagaagagcctctccctgtctccgggtaaatgagtgcgacggccggcaagcccccgctccccgggctctcgcggtcgcacgaggatgcttggcacgtaccccgtgtacatacttccc

SEQ ID NO: 1446 - DNA, 386 bp, Homo sapiens
tctggaaagttcttgctcgggtcccttcacctccccgccctttcttaragtgcagttcttagccctctagaaacgagttggtgtctttcgtctcagtagcccccaccccaataagctgtagacattggtttacagtgaaactatgctattctcagccctttgaaactctgcttctcctccagggcccgattcccaaaccccatggcttccctcacactgtcttttctaccattttcattatagaatgcttccaatcttttgtgaattttttattataaaaaatctatttgtatctatcctaaccagttcggggatatattaagatatttttgtacataagagagaaagagagagaaaaatttatagaagttttgtacaaatggttt

SEQ ID NO: 1447 - DNA, 261 bp, Homo sapiens; identical to SEQ ID NO: 288

SEQ ID NO: 1448 - DNA, 404 bp, Homo sapiens
aaaaaaaggaaaaagttttattacgaaactagtttgtataaaacagggttatacatatttttgtaagtttgtaataaaacagtaagaaaaaaaaggcagtaatagaaatctccaaaaggcaacctatcaaaaccaactggctgccactttgagtttggacagtagctgcataaactttgttcttcttgaacagtatttaataacatcattaatacattaacaacatttctataaagtaagacacattggtgctgaagtacaactggtggcctcttgatctcacctatgaggagagttctttacaaaaccacatagggaaaattgcagttgtaaggtgaactacacatctaaaatatgcagaggtaatagcattacatgttaaagtatcaagatatacacatttt

SEQ ID NO: 1449 - DNA, 230 bp, Homo sapiens
aaaagttctagtggtacggtaggagctttgcaggaagtttgcaaaagtctttaccaataatatttagagctagtctccaagcgacgaaaaaaatgttttaatatttgcaagcaacttttgtacagtatttatcgagataaacatggcaatcaaaatgtccattgtttataagctgagaatttgccaatatttttcaaggagargcttcttgctgaattttgattctgcag

SEQ ID NO: 1450 - DNA, 194 bp, Homo sapiens
aaaaactccttttggtttacctggggatccaattgatgtatatgtttatatactgggttcttgttttatatacctggcttttactttattaatatgagttactgaaggtgatggaggtatttgaaaattttacttccataggacatactgcatgtaagccaagtcatggagaatctgctgcatagctctatttt

SEQ ID NO: 1451 - DNA, 106 bp, Homo sapiens
aaagatgacaaatactggttaattagcaatttaagaccagagccaaattatcccaagagcatacattcttttggttttcctaactttgtgaaaaaaattgatgcag

SEQ ID NO: 1452 - DNA, 349 bp, Homo sapiens
ctgcagatcctgcggaacgtcacccaccacgtttccgtgaccaagcagctcccaacctcagaagccgtggtgtctgctgtgagcgaggcgggggcgtctggaataacagaggcgcaagcacgtgccatcgtgaacagcgccttgaagctgtattcccaagataagaccgggatggtggactttgctctggaatctggtggtggcagcatcttgagtactcgctgttctgaaacttacgaaaccaaaacggcgctgatgagtctgtttgggatcccgctgtggtacttctcgcagtccccgcgcgtggtcatccagcctgacatttaccccggtaactgctgggcattta

SEQ ID NO: 1453 - DNA, 302 bp, Homo sapiens
aaaaataatgtgcaagagcatcatgagaaagaagaggggtgaagagataatccagaggaacatcaaatgtaagagtatacactcaaagacaggtttaagaaagaccagtcagagaagtaaagaaaaaaatcaagcaagaataatgttgcaaaaattaacaagaaagttgcaagcccagagtggttagcaatgccaaactaccatgagtaagccacataaaacaagaactttgggttcaactgctttaacaatcagacctttagattcacataacaggagttacaaaattaagagcctctttt

SEQ ID NO: 1454 - DNA, 268 bp, Homo sapiens
caagcgtaaaccgcgggagccgagcccagctaggaatgcagacctcctgaaaaccaagccgaggactgcggggtccggtgtccacgcagagtgtcagcttcctctggtgcaaccagcaagtcttccagtatgaatcccacagaaaccaaggctgtaaaaacagaacctgagaagaagtcacagtcaaccaagccaaaaagcctacccaagcaggcatcagatacaggaagtaacgatgctcacaataaaaaagcagtttccagatcag

SEQ ID NO: 1455 - DNA, 207 bp, Homo sapiens
  misc_feature 29: n = A,T,C or G
ctgtcgagagcagccctgcccaagawtgncgggtgggggctggtgccaacgggttcccaaggscctttcmactttkgaakggctggarttcttgggaaaccmaaacsktgactacctgscttttttcttgggcatygacstgcttcatttccaaaratgatggkgcaggtgaccttttccatcgtgagctaaaaaaaggttaggagg

SEQ ID NO: 1456 - DNA, 181 bp, Homo sapiens
aaatttctgtctgctaaaatctatcaaatacattaaggaaaagtcccacttggcacatctcccacaccagatgttaattattcatactgcatgactgaggattttggaggcagagagagattcatctgcaatatttggaacaccaatggaggtctacgtcaacacagaatttatacagcag

SEQ ID NO: 1457 - DNA, 309 bp, Homo sapiens
aaaaagwtcagagttgaaatgcctttcaaccattkccttctgtggtcatttttcttgctgcctttttcacccaagattcagcagtcagatgtttactgcacacctattacctattatttgctgttcttgcatggttcaaaccaccattctgtagccacccatcctttgccttatctaacaaacatttttccaggaaggtggaaaaggaagtgttgctctcattgtgtgactcagtgctgctgtccatcccatggaaacatgggcacaatcaagtatttgtccagcctattgcaggcttttcctgacttt

SEQ ID NO: 1458 - DNA, 117 bp, Homo sapiens
aaagactattgagaaataggaaggtattgagagattattgggtttcatcakagcagacttaagtagcctggttgattttagatttgtcacagcaaaatcatgcttggatgctcgagg

SEQ ID NO: 1459 - DNA, 575 bp, Homo sapiens
  misc_feature 371, 379, 428, 469, 498, 506: n = A,T,C or G
aaagaatgcataccagaacatttataagcagtggagtgagkthtattaagaatagtactactacaataaacgctggctaaataagaagtgcattatgtgaagcactatgggtggtatatgcttwgmcacatactctkgttaccttgaggyagatmacrcatgkgaaccaacttcggcatacattttcagttgctgcgaggaatcatgtgttttaacgaaatgcgtcagtatgaaaaacttgaaaatattcatgaatgawgaacgcmttaggaaaaaaatakstattctcatgcaattatgtacagtctcactgtgtaratctcaaggcaaggtttgcctcctgtaaaccagatcaaggtgctatgagagancgccytgncttattgcatttcttttctcctmctgcgccagcattatattgctctagnctttatttttgtgtgcacactgacatgccattaaaratgangractatctcacatgtagaaaargaaagnmcttggankctacctcaggtcgctaccacgctaagggygaattctgcaggatatccatcacactggcggcgcgattg

SEQ ID NO: 1460 - DNA, 444 bp, Homo sapiens
ctgggggttccttccttcacgttgagaacctggagcagagagtctaccaacttaagaaatattagaaagagttcagcaaacagagtgagctgaagtctaatcctagaagtaaatccattcctacaagtcatcagcatcacttgggagcttgttagaaaggcaaattcttggttcagcctaacacctactaaatcagaaactctgggggcggagcgcagcaatctgtactttcacaagccctgcaggtgattctgagcctgtaaaatttgagaaccagagctgtcccccaggagataaattaacttctacttttttttgagctactgcattttgggatcttattgttttatcagcttaacatgcatcctgatatgattactcaggtatgtttcaaccaatgttggttaatgtattatccccaggaacttattactagaggagcag

SEQ ID NO: 1461 - DNA, 536 bp, Homo sapiens
ctgcaaccctgggactgaccgggaggctctgattatttacccmaccacaggtaggttgtgttctgaatctcaggttcacaggttaaggttcagcatcctcatcctccacggggttggagttgttgctggtgatgaagggtttgggtggctctgcatagactgtgatcgtcgtgactgtggtcctattgaggccactggctgagttattggcctggcaggtatagagtccgctgttcttctcagtgatgttggagataaagagctcttgtgtgtgttgctggatgttcccatcaatcagccaagaatactgtgcaggtgggttagaggctgcatggcaggagaggctgaggttcacccctggacggtaataggtgtatgagggggaaatggtggggkcrtcygggccatagaggacattcaggatgactgrgtcgctgtgstyarcacttaatkcgttctggattccacactcatagggtcctacatcattccttgtgacaytgartagagtgagggtcctgttgtcattggacagm

SEQ ID NO: 1462 - DNA, 409 bp, Homo sapiens
ctgakagaccaggagaagttccagatgcagagactgtgatgctcttgactatggaattattgcggccagtagccaagttagagacaaaacaggcataggtcccgttattatttggcgtgattttggcgataaagagaacttgtgtgtgttgctgcggtatcccattgatacgccaagaatactgcggggatgggttagaggccgagtggcaggagaggttgaggttcgctcccgaaaggtaagacgagtctgggggggaaatgatgggggtgtccggcccatagaggacatccagggtgactgggtcactgcggtttgcactcactgagttctggattccacatacataggctcttgcgtcatttcttgtgacattgaatagagtgagggtcctgttgccattggacag

SEQ ID NO: 1463 - DNA, 502 bp, Homo sapiens
ccttcagcctggatcctttatattaagatcaatgaggaccatttctggaagatgtctggcatggtacagactgtctgaggccractgaacacaggcccttaccctgattttatcagtgaaaagctatgggactagtttccttacctctaaaatggagagaataatagaatcttccgtctaagactkctgtgagcataagccgagaaaatggaggtaaactgcttagcccaatacttggattatcgtaaatattcagtaaaactagccaccgttgttattgtaattattattttgtattttattatacatttcatggaaacttaaaagttagtgataatcacctcattttcagttgccttgctttcttcctgtaaattttattctctcttatcttgctcactgtctttaagcattgccagtttagtataattattttcccctatcctctataaaatcatatacaggatggatttgttgatctcagacatgttcactgagtttt

SEQ ID NO: 1464 - DNA, 294 bp, Homo sapiens
ggcggctcggactgagcaggactttccttatcccagttgattgtgcagaatacactgcctgtcgcttgtcttctattcaccatggcttcttctgatatccaggtgaaagaactggagaagcgtgcctcaggccaggcttttgagctgattctcagccctcggtcaaaagaatctgttccagaattccccctttcccctccaaagaagaaggatctttccctggaggaaattcagaagaaattagaagctgcagaagaaagacgcaagtcccatgaagctgaggtcttgaagcag

SEQ ID NO: 1465 - DNA, 249 bp, Homo sapiens
gtgcaggtcttcagccgtgacccggtaccccagctctaagggaggtggcagcatcaaaggctcccctcgcctgcgtggcagcaggggaatcttgcgtctacggggcctagagtcatgggatctgggggagccacccctgggggcaagtgtctgccctggtgctgtacctgccttgttttcacagcggtgacccgaagagacagcctgaggtccgtcctcactcactgtgtttgaggaactgtgggccag

SEQ ID NO: 1466 - DNA, 203 bp, Homo sapiens
cctcagacaccttttaattgcttaggagaaaccattgtctctgactgcaggtttgaataagttgaagaccagagaaaagtacacactgggctacaaaggaatttggagatagccaaggaacaggatttcccctagcaagctaccttctgttcaaatcatgaaaaaagactatttccccttagaatagggaagcttgctatttt

SEQ ID NO: 1467 - DNA, 223 bp, Homo sapiens
ctgtcagaacaggaacgacctgggttatggaagcccagaaagggaggaggacttcttttggtcccagtgaaagatgcttccagaatctgtagccttacttatttgcttggatctcactggaataacttggtggtgaggtcaccggttctggggtgatcactgggtttgctgcatagatgtttggatagatgacactcacattgcttgattgacagcagaccaa

SEQ ID NO: 1468 - DNA, 177 bp, Homo sapiens; identical to SEQ ID NO: 1326

SEQ ID NO: 1469 - DNA, 185 bp, Homo sapiens
ctgaagctgagaagtagcctatctatggargagacttttgtttgtgtttaattagggctatgagagatttcaggtgagaagttaaacctgagacagagagcaagtaagctgtcccttttaactgtttttctttggtctttagtcacccagttgcacactggcattttcttgctgcaagctttttt

SEQ ID NO: 1470 - DNA, 482 bp, Homo sapiens
ctgaccaggagggacggttctgtggacgaggacttcgtagctgaggagccagatttctttttggtcccttcctcctggaatggaatcgtggcgctactgtggagatctgagttgatgtagcacctgcttcctcggatgtagtccgcaccccggaccagatgccgctcggtcgtgggtctggagaaccggtatgggggagaggagctctcttcaatgatcggaggaatccgctcgttactgaaataccggcaaagggcatcctcccctttcctgccatgacctcgaggtctggcaaaagggtccacaatccccatccagttcccatcagcaggcatggacaaaggccgtggcttgccttcagagggacgagaaagaaggtgacaagtttgatgagttctggaactttagtgaaccgttccctttatgtataacttagacctcacaataccacacccacttagacagaagcaataacaaatttt

SEQ ID NO: 1471 - DNA, 257 bp, Homo sapiens
tgtgtgaacttagactkwtcaattcaacatttttaacrtatkaaatactattgtgaattcaatgaagtgttcttatgccactaactttaacctattcccttactcamggatgtaggyaaargatggtaacaatacactattkggcaagataatgtmctgacatmtytagcaatsttttttgmcagtggcttkcaactgmamwkaaskkammkaatattgytkctgtwsgtarattattattctgwywytaatcattt

SEQ ID NO: 1472 - DNA, 342 bp, Homo sapiens
cttttgcgagcctctgccgcagcagctccgttttcacgcgcatctcgtttttgtgtgtgtgtttttgttttgtttttgtttttgtttttttgtttcagagaattggaagctaaagctaccaaagacgtagaaagaaatcttagcaggtaagatgggcgagctttccgtctcccgccccacgataatcgtatatttctactccgattcgccctttctgggttgagaagttcccccgtgacattttcttccgcacccggagagcagacattcgggagaagcggcctgggggaatactggagggattgcggggagatgcgtaattacgcgtgtgtttctttcttt

SEQ ID NO: 1473 - DNA, 526 bp, Homo sapiens
  misc_feature 435, 442, 454, 462, 476, 524: n = A,T,C or G
ctgctacatgtcttcacagcccaggaattcaaggcccaggtggcagcaggaagaaacagtggaaaagcaaggggaagagaaaagagaaaaaggagggggaaagtctgcataactgtcataacctctgcttctcctgctctgtaacaaacccacaaccaggaagagtcatggtctggaacaatcatgggaccccaaacgcctgtaggttttttaccaccaaacatcacccatggctgctctaagctgtcattttgttcccacagttacctagcatcacggatgcccaatttatggcccaggaaggctgacccaggctaagggcagtctcactccacagccatgcaatggacagtctgaatgtttcctaccccagacctttactgacctctactatttcctcctctgatataaaagaaaaacacttttaattttctnctgcatnctacatctcctnctaaaaantttggcctaattgncatcaaaaccttgtaggaatctgaaattttggttcttctgaatcttancc

SEQ ID NO: 1474 - DNA, 187 bp, Homo sapiens
aaacttgtttgctgtgaacaattgtcgaaaagagtcttccaattaatgctttttatatctaggctacctgttggttagattcaaggccccgagctgttaccattcacaataaaagcttaaacacattgtccaaaaaaaaaaaaaaaaaaagccccykcccsgggggscckttmaaggggraawtccc

SEQ ID NO: 1475 - DNA, 474 bp, Homo sapiens
ccattctctttatctcaaaccgaagaaagatatgatgcaggcagtagttttttcttagtgcctcatagtatctaatagcagaaagtgagccgcatagcggagcacattagtttttatgtatctacaggacagaagggccacttagctgatggctccaggtttcctttgatataatctaatgttcctatgacctcaaagactgaacacatttccctaagtgcttcacttagcacccaggagcaacttggagtcttcgcagaataaaatccattattttaatgtagattaatacatgggtacttatatctatgcaggtctataatagtttattcctatgtaagctttattaaaagcattggtatgttttacataaaaagttaatgtgaatattagaaaaaaaggacaatattaaagcagtttgtagaatttgttccccccccaaaatgaatgaaatacacaatagatgtacaaaaa

SEQ ID NO: 1476 - DNA, 401 bp, Homo sapiens
ccttggggacagggcaggaggacgcacacctcatggacagggcggccagggctgagataccagcggggtgggtattcccggcgggtgcttacctccaacagtgtcttgtcagcaaaggccatgatgccctcaaagatgatgacgtttgcaccatacagtgttttctgtgaagaaacccaggagttgcggagcctggctcatgtgcctgcagccccccgaggccccctctgcagggccctggcctacccagtccttcttccggctgtgcgtggtgaagtcataaatgggcaccttgacactcttcccctgcttcagcttcttgagggtggaaatgatgaaggtcgaagtcaaaaggcatctggggtgggtcgaaagtttgaaagtttgcttgtggtgccggg

SEQ ID NO: 1477 - DNA, 753 bp, Homo sapiens
  misc_feature 59, 75, 152, 194, 200, 203, 205, 674, 682, 709, 737, 746: n = A,T,C or G
cagcatgcttaaaaagttggaggaattggaacagaaatacacctwmcaacctkrmcctnttaccaaaaacaaacnagtggtatkggamccsacctttmrkctttttcmacmacttatttcaaagytsrttkgtggkgaaaagmcacycyksnatscywccrcacccttgwaggcygttggacttrataacakknctgctnatnwntgtgaggggtgataytgatgrtgaaattgcacttagctgggttataattkgaaagtcaaagtcttatttgataaagatgtgaatgagagaaatacagtaaaaggatttaggaagttcaacattttgggcacgcacacaaaagtgatgaacatggaggagtccaccaatggcagtctggcggctgaatttcggcacctgcaattgaaagaacagaaaaatgctggcaccagaacgaatgagggtcctctcatcgttactgaagagcttcactcccttagttttgaaacccaattgtgccagcctggtttggtaattgacctcgagacgacctctctgcccgttgtggtgatctccaacgtcagccagctcccgagcggttgggcctccatcctttggtacaacatgctggtggccggaacccaggaacctgtccttcttcctgactcccccttgtgcacgatgggctcancttttcanaagtgcttgagttggcagtttttcttnttgtcacccaaaagaaggtctcaatggngggacccanaaccttt

SEQ ID NO: 1478 - DNA, 421 bp, Homo sapiens
  misc_feature 399: n = A,T,C or G
aaacctatactcactttcccaaattgaatcactgctcacactgctgatgatttagagtgctgtccggtggagatcccacccgaacgtcttatctaatcatgaaactccctagttccttcatgtaacttccctgaaaaatctaagtgtttcataaatttgagagtctgtgacccacttaccttgcatctcacaggtagacagtatataactaacaaccaaagactacatattgtcactgacacacacgttataatcatttatcatatatatacatacatgcatacactctcaaagcaaataatttttcacttcaaaacagtattgacttgtataccttgtaatttgaaatattttctttgttaaaatagaatggtatcaataaatagaccattaaccaanaaaaaaaaagaaaaaaaaaaaa

SEQ ID NO: 1479 - DNA, 214 bp, Homo sapiens
ggaaatatataataaaaatgttaaccagaaggtaaacttgagtgtaattgtcagacagacacacttttccaccagtgtatttgaattttagaccagtgaccctgttttgtggcattcatgcaaaacatgctgagggctttgttcatctggtcatcgtgtccaaatttcagtcatgtttgtagcaagattttggaagcattcatatttccttttt

SEQ ID NO: 1480 - DNA, 434 bp, Homo sapiens
ggaggccgcttacgtaaagcccaggggacattcaacagcccctactacccaggccactacccacccaacattgactgcacatggaacattgaggtgcccaacaaccagcatgtgaaggtgcgcttcaaattcttctacctgctggagcccggcgtgcctgcgggcacctgccccaaggactacgtggagatcaatggggagaaatactgcggagagaggtcccagttcgtcgtcaccagcaacagcaacaagatcacagttcgcttccactcagatcagtcctacaccgacaccggcttcttagctgaatacctctcctacgactccagtgacccatgcccggggcagttcacgtgccgcacggggcggtgtatccggaaggagctgcgctgtgatggctgggccgactgcaccgaccacagcgatgagctcaa

SEQ ID NO: 1481 - DNA, 131 bp, Homo sapiens; identical to SEQ ID NO: 1366

SEQ ID NO: 1482 - DNA, 324 bp, Homo sapiens
tgctcgctcctcagaggctgaaaacatgagaagctaggtgtggtgaaaccaaagcagctttattgttcaaatgctaaagacgggaggatggactggctcaagccttaaagaaaccatctcgactttttgaactcagtgaacgggtttaaggaaaacgtgggaaatatgcaaaggtggtgcaggagggtgcaggtctgtgtgtcttattcccatggatatcttgagtaatcgcttgtccagaggtggggtttgtgtcatcctgaattcaacccagcaatggtagggtactgttcataactcaccctaagccagaagattcctcag

SEQ ID NO: 1483 - DNA, 393 bp, Homo sapiens
atgtttaatgaatgatacaggatacatccctgttggaagcttgcaaaagacacatacactgtggtacatatttgatttaatagaagttgtttatcaggctatatatatatttgcccaaacatgcaccacaggataaaataactatttacataacatagggtatttaattgacatagactatcagctttgctgagagcagaagatggcaaagcaatactgcagcagaaagtggaacaactattctaaagcaatactttagatatatttttctagaatggatttattagattactttttggaaagcatttgacctaaattaaatatagagctctgaaacttagaataaaatttgcacttgctgaaacagaatactttgcataaaaataatccttt

SEQ ID NO: 1484 - DNA, 323 bp, Homo sapiens
tttagatcagaaagtttgaggtcttcatcagcagacactcgtgcttctatttttcttgttttatcgaacagttctgaaactttgagaaaaaacttgcatatatctgtagaatcctgagttcctaaagcatataatgaagaaccaattctattgtaatcatctgcagcacttttgtgggatcttgtcattctatcagatttagcagatgcatccttaactcggttatgatattccaaaagaaatgttcgttcgtgctcaaagaaatcatctacatcctttactcctgaaacgattactccatctgctgatttaaccatgttttt

SEQ ID NO: 1485 - DNA, 405 bp, Homo sapiens
aggagcgtcaggaaaacacgggcagcctgggctctgacccgagccactccaactccacggccacgcaggaagaagacgaggaggaggaggagagttttgggaccctctctgacaaatactcctcccggagactattccgcaaatccgcagcccagttccataacctgcggtttggggaacggagagatgagcaaatggaaccggagcccaaattatggcgaggccggagaaacaccccgtactggtacttcttgcagtgcaaacacctgatcaaggaagggaagctggttgaagccctggacctgtttgagaggcagatgctgaaggaggagcgattgcagcccatggagagcaactacacggtgctgattgggggctgcgggcgggttggctacctgaagaagg

SEQ ID NO: 1486 - DNA, 230 bp, Homo sapiens
aaaaatatgtggattgtgcttgacgtagcaaatttcttctatctgcaaaagcccttttctcactacctcatatacacccctttgatatggcaccatgtttgaaattggagcgtacacacatagtcattggatttactgggattctctttgtgacaagtaggagccaaggggtcatgcagggaagcgaacgtgcccgataaggatttccttgttgccagagtgtttagcag

SEQ ID NO: 1487 - DNA, 273 bp, Homo sapiens; identical to SEQ ID NO: 1424

SEQ ID NO: 1488 - DNA, 452 bp, Homo sapiens
cctactgtgccccgtaggcaaagctctgaagatttcatcgaaaaatctgctgtcaatacgtagaaaagttcactatttcagtttcacagcaaaaaaggtggggggaggggggaacccaatagatatttaagtagatgctttccaatcccattcactgcattaattagcttacctcttatacagtacaacataaacattgcatgtttatttgtatgtaacacctataagcatatagcatctacattttaagtgtatttacaaattcaacaaaatatctacatataaaaagctttacttaaaattaaacttgatgcaagttatgagaaaccaatttattggcaaatgaaactgagcattccttcaaccataggttgttatagattttcatatttggaggtaacccatttgatagatattgtttatgaatacgatagaatatatatttacttttt

SEQ ID NO: 1489 - DNA, 653 bp, Homo sapiens
  misc_feature 556, 562, 568, 573, 589, 592, 632, 637, 645: n = A,T,C or G
cctgctcttctcttcaaagcacttagtacacagggktacaggtgctaccacttggattccccagagcatggaagtctgatcccaggttgaacatatttcttctgaaaatgagcatcttggttctatagattcttatcttgctcacaggacttgctccaaaactgaattttcagaagcagcatgatagggaaagagatattcaactctgacagacaaggtagatcgaagcacccacactaatttctttcaggtgccccatgaggaagactgcatcatgtcacttccactcacttggggagattctaggactgagacacaaagttcccccagagtttctgctaatggaaggggaaacaggtggtttggaatggaaaggtggaaccaggtccacaaaatgtgctccctctgctcaagactgactttggctttcccaggtccccacttgactttcatataagctgagatgacctattacgggaaaaattagggaacacctaataaaaccaactttcaaaaactcctatttatcatggatgtgccacgatcgagagaatcnaacacnaactgnctgtnagagaggccttcattntgnctcatcttgagctaaaatcctgrcttgggatgccagaaancatgnccctcttntcggtttg

SEQ ID NO: 1490 - DNA, 363 bp, Homo sapiens
  misc_feature 347: n = A,T,C or G
taacctgacaaaataaaacttagtaaaatctakaactgtttcttggcctacttgagaggaacttccatattttcacagccatctccgaaagcagcagttgctgtaaattaactgagacttggaaatggtgcagactgtcttggtagagctgttcttatagcacaattttatctggaaaataaacttgtaaatgcgtgctgtatattaatacatgtgtgcccatatttatttttattatctcctgccagtctttgctcaatgggagatgacagaccaacttctcaacgtgatttccccatttcattgaatgagatttatatgccacttatgaaaaaaaatactgctgngaaagaaatgtacttt

SEQ ID NO: 1491 - DNA, 163 bp, Homo sapiens
taatcagcccctaatttctccatgtttacacttcaatctgcaggcttcttaaagtgacagtatcccttaacctgccaccagtgtccaccctccggcccccgtcttgtaaaaaggggaggagaattagccaaacactgtaagcttttaagaaaaacaaagtttt

SEQ ID NO: 1492 - DNA, 184 bp, Homo sapiens
yattccccaggggaaaaattgaaagtcaaactattcaccaagagaatgcattgtctttgcaaatgagcctaagaatcagactttttataaatacatgttcaagtttcttgtggttctaaatggacactgagaactgaaactgtctacaccaagtttacaatctatattaactatcattwtacag

SEQ ID NO: 1493 - DNA, 273 bp, Homo sapiens
  misc_feature 39: n = A,T,C or G
aggtaawttgtgatatttagtgcacatttacgtgtaggnccrtcttkaatggtaaagacagatacaagcctatggcacacttctccaaagcaagctatacttgagagccaattcccaaataagacagcagagatctgattaaatgcaactgtgcaaacattcaacagacatgttgaatgtaagacaaattatgattactgataatatgcaaatgtggtctataaatttatgaatgtgacttccaaggggaatatggtatggaagcccattttt

SEQ ID NO: 1494 - DNA, 343 bp, Homo sapiens
ttggaaagcctatcactttctctcttcattctccagcccccacaccaagcacacagagcttttcagtgctttactcttaatggagaacataaccagggattatcaggtattccaacatgaaaaagaaagtccaatagaaacaagcaggataatcaaaccaggaggaagcagagactatatagagaaagaaaaaaagacacatgggaataacggcaataatactgacaatacacctcaccataaacttatcagaatgaatttgttggagaaatatatggaggggaggtacttgtgtgtgtgcacaggcactcatgtacacgtgtgtatgtgtatgtttttttaa

SEQ ID NO: 1495 - DNA, 378 bp, Homo sapiens
tagcattcttccagccactctggcgtcactatgtgcttcacgacagaaatcgccgtcaggaacttcacggtgcgagtcactttgctggcaatgaggtgtgtgcacttctgtgcagactccgcaacctctccaccaagaatgtagagcttcttaatatactgttgaacctggacaggctcgaatccagtgaaaagcacaaaaggggtcaattctggagttagctttttagtgggaggtggtacgtcttcaattctggctcttttggaagaaggctggacattagctacttcattctgtttcagtttgggaggtagtcttatactcatcaacaactctgcagacacttttaagggaactctccaagcatctaaaagattt

SEQ ID NO: 1496 - DNA, 181 bp, Homo sapiens
tggagaaggaagttttcctgaagagccagaatccttgctaagtcatttagatccaactgaccatctttatttctgtcaaaaatcttcatcatggtgccagtgtattcttccagtttagcctcagaaatggcctttttgtggtgaagaaagaggtctcggaggaagttgcggagctcagcag

SEQ ID NO: 1497 - DNA, 373 bp, Homo sapiens
tggaagctgatccaccttgagatcaagccggccatccggaaccagatcatccgcgagctgcaggtcctgcacgaatgcaactcgccgtacatcgtgggcttctacggggccttctacagtgacggggagatcagcatttgcatggaacacatggacggcggctccctggaccaggtgctgaaagaggccaagaggattcccgaggagatcctggggaaagtcagcatcgcggttctccggggcttggcgtacctccgagagaagcaccagatcatgcaccgagatgtgaagccctccaacatcctcgtgaactctagaggggagatcaagctgtgtgacttcggggtgagcggccagctcatcgactccatgg

SEQ ID NO: 1498 - DNA, 337 bp, Homo sapiens
gctcttgtagtgcttttcttttaagggagatgtagtaaaagggaaaatgtagctcttagtttacacttcaaagatgtgggggtctttcagagaactaagaataacagttttatgtgcagagagagtttgccagatctgaagcatatacctcattgactaggctgttactttgggataggttgcagtaccagccacagccagcagatagaggaaaagacacacataaactcgcttctgagcgtccacttctgcactctctgctctgctgttactcagcccctgagtctgactcatctctgcacaacctctctgtgccatgaagataagtcttccatgg

SEQ ID NO: 1499 - DNA, 314 bp, Homo sapiens
catgcggagggactttagcatggctgataaggtccttcctaccattccaaaagaacagaggaccagagttgcacactttttggaaaggcagggcttcaagcagcaagctcttacagtatccacagatcctgagcatcgttttgagcttgctcttcagcttggagagttaaaaattgcataccagttagcagtggaagcagagtcagaacagaagtggaaacaacttgctgaacttgccattagtaaatgtcagtttggcctagcccaggagtgcctgcatcatgcacaggattatgggggcctgctgcttttgg

SEQ ID NO: 1500 - DNA, 321 bp, Homo sapiens
cctgaaacctggtgggaagatgattgaaagtgttttagattcaacagattgactatgtatgacttatctattaaaatgaagaacttccatggtttaatagaatgaatgctgtattcaacaaggtcttccatccttcttataaatcttaagactgtgtttaagctttctttcacttttactctatcccttggaagttaattgggaataaaaagatttatcaatttagtcactataatttaaggccaggcatctgcttggaaatacaataaccacaattaatacttagagaaaattgtttcaacagattaactctgctatttt

SEQ ID NO: 1501 - DNA, 557 bp, Homo sapiens
ctgctctggggaaaatggtggaggagccaggcagagaggaggagcagagtgctggcagtggaaagcctagctgagactggagatgcccccctgcccaaagcatctcagcgaggatgcttctccatatgggtgagccagcctagagacagaacaggggaagccagcgggtgctgcagcgacccaccgccccagaacatctgcatcttacatcaacaaaggtttatttctcattaatatccattgtgggttggctgccactctaaccctcgttgcctctccatctgggtcttgggtggcagagcagcctgtctctgtggcagaggaaaagagagcactgggcagcacaggctgactctcaaattttccgcctgaaggtgacccaagtcactgctcacatttcattgactaaagcaaaatcctatgcctgtgggtgagttgagcaacgtgatgaggtgttaacttcctacagggaggggctcaaatattgcccaacagtggtatggcccactgcctggggtggtcggtggaaggctggcaggacaagggagaccacgtgg

SEQ ID NO: 1502 - DNA, 249 bp, Homo sapiens
cctgcggggaggcgcgctgcaagaacctgcccggctcctactcctgcctctgtgacgagggctttgcgtacagctcccaggagaaggcttgccgagatgtggacgagtgtctgcagggccgctgtgagcaggtctgcgtgaactccccagggagctacacctgccactgtgacgggcgtgggggcctcaagctgtcccaggacatggacacctgtgaggacatcttgccgtgcgtgcccttcagcgtgg

SEQ ID NO: 1503 - DNA, 302 bp, Homo sapiens
ccaggacctcttttgggcatttcttcctaagtggaatacacaacagataagggagtaggggaggtaatacagggaagctactctttccagctcagaaggagttgatgaagcccatatatgcattcaagaagcccatgggatcctctagctgtggatagtggctaatgtggtcatccagaatcgacactgtggaccgcggcagcgttttcctgtacagctccaaaaactctggatagggatttacaggatccaatggcccatagataaaatgaatggggatagttacagaggcaagagctccc

SEQ ID NO: 1504 - DNA, 430 bp, Homo sapiens
ccacgatatcaactatttggctttgtcaggtgttctctcaaaaattggcagaagtggtgagaatccgtatgccccgctgaatctcctggctgactttgctggtggtggccttatgtgtgcactgggcattataatggctctttttgaccgcacacgcactggcaagggtcaggtcattgatgcaaatatggtggaaggaacagcatatttaagttcttttctgtggaaaactcagaaattgagtctgtgggaagcacctcgaggacagaacatgttggatggtggagcacctttctatacgacttacaggacagcagatggggaattcatggctgttggagcaatagaaccccagttctacgagctgctgatcaaaggacttggactaaagtctgatgaacttcccaatcagatgagcatggatgattgg

SEQ ID NO: 1505 - DNA, 164 bp, Homo sapiens
ccagtcaccttcaccttctaactaactagcctccggatgaggtggctgccaccaggcccgaatgatccccaggagcccagcttccaaaccccaacatcgaatcaaacatctccatccccaagtgcagtaacacacaaaaaccaaacactctgccctgggaaagg

SEQ ID NO: 1506 - DNA, 189 bp, Homo sapiens; identical to SEQ ID NO: 1413

SEQ ID NO: 1507 - DNA, 268 bp, Homo sapiens
ctgcacagaggggcacggaactccaaatcctggaatgcgggtcaataatgtgaattctggccctgaccgccagacacacagcaagcctgagtcatctgccgtcaccatgtcagccacacaatcctgtccctgggcaggctcggtggcaatgtctgtgattggcatctggtgcccagccagctcctcgctcagtacaatgttgggaccctttgctgggatgtcaaacaccagcacccggcctgaccacgttcccacacagatgaagtgg

SEQ ID NO: 1508 - DNA, 159 bp, Homo sapiens; identical to SEQ ID NO: 1342

SEQ ID NO: 1509 - DNA, 234 bp, Homo sapiens
ccattgtggagtacattatgaacacaatgtgcttgykaagtcttctctctcattttcagacagcaattgttaagagtcacacacacgtcccagacctaagcagcaactccagtgaatggtactcagacacactcacgggacagcacagaacttgattcttctttgtctgttgcccaaagaacctgttctttgagtctgttccaggtgacttgtaatgatacctcttacggtttt

SEQ ID NO: 1510 - DNA, 437 bp, Homo sapiens
aaagcagtacatcttaatatgaagacaggaatttctatgatgcttacgaacattagactcaacatttttgcagccccctttcctggtctacattcacacaaacatgagacacagtcccaagggagaaacagatgctggaggagcatttagggccagagtggaggcacagaggaagctgggatttttcaactaccccctccttggttactcctgggattcccttaggatttcacggcacaaccagcgaagagtttgctcagattcacttcggagtagccacttcgggacaagaattgctctgctgtgttcttgagttttctgtagtcctgcagaactttgggggtaaaaaattgcttcttcaatttatctttctcatgatcggtagtaagtttctccagtgcacactccgcatcaaaaatgtaccggtaaaagcacag

SEQ ID NO: 1511 - DNA, 94 bp, Homo sapiens
tgtgaagatggagtctgaggggggtgcagatgactctgctgaggagggggacctactggatgatgatgataatgaagatcggggggatgaccag

SEQ ID NO: 1512 - DNA, 493 bp, Homo sapiens
aaaaatatgcattacaactggagttttccactgagaataagagtttggttttgacctcmcataaatccaagggttcttgaaaaaaaagttaatataaattctcaataactatatcattaataccttatgtatacataggagtttatataatgcatttaagtaacaaagaatgtaacatttattagccaccaagtaattaggagatagcatcaattatattgaaagaagatgagtttagatgcttatagtcaagggagttaattgaaattgaaagctattgtaggtggttactactattattatcaaacctgaaagttggaacatgtgaacttgatcctttgcacacataaaagttcacaaagctgcttttaatttgcctttgttctgtagtactgcttggtgaatcatgcactagtttgttgtaaaattcatgtaaacttttatgtatacaaatgtcagatcaagcacaggttttattaattatatatatttt

SEQ ID NO: 1513 - DNA, 510 bp, Homo sapiens
aaatgaggattattgatagtactcttggtttttataccattcagatcactgaatttataaagtacccatctagtacttgaaaaagtaaagtgttctgccagatcttaggtatagaggaccctaacacagtatatcccaagtgcactttctaatgtttctgggtcctgaagaattaagatacaaattaattttactccataaacagactgttaattataggagccttaatttttttttcatagagatttgtctaattgcatctcaaaattattctgccctccttaatttgggaaggtttgtgttttctctggaatggtacatgtcttccatgtatcttttgaactggcaattgtctatttatcttttatttttttaagtcagtatggtctaacactggcatgttcagagccacattatttctagtccaaaattacaagtaatcaagggtcattatgggttaggcattaatgtttctatctgattttgtgcaaaagcttcaaattaaaacag

SEQ ID NO: 1514 - DNA, 511 bp, Homo sapiens
  misc_feature 472: n = A,T,C or G
ctggagatcaggaatagaacctttccaagatatcataatattttctttataggaacactgagtaatggcaagaatattttgagcttttccatggttaagagcgatagtctcagaggctggagaaaatgttcattctgctcagtgatccaggagtgtgaggacagtagcttcctttccacgtccacaagacaatgacagatgtgtttccttctttgccctttctagggatctttctagggatgttgattctctcacaatatttcaatgtcccatttctgtgtttcttctccctccaggggctgatttacgattacatgagtcttgtcacaataatttcctcctttaacatcaaggacaagttgatcactgagataagagctgatagttccatttttattcagtctccacttctgcctgaattgcccatgttcagtccatagagctactttagctccaggtgtggtcccggccnccatcacatcaagaactggtttcactgggccttggatta

SEQ ID NO: 1515 - DNA, 176 bp, Homo sapiens
aaaggggaaggkgaracttaaaagtattcccaactagattatctacaccaatacattggaactctatattttgctttcattttgtcttaaaaaaatgaaatagcaacgctctatcagtcacacagaggacatgcaratttagcagtattgatattatactctatcttgttggattt

SEQ ID NO: 1516 - DNA, 309 bp, Homo sapiens
ctggggaaaaccgtgcattacctgcccatcctgttcatcgaccagctcagcaaccgcgtgaaggacctgatggtcataaaccgctccaccaccgagctgcccctcaccgtgtcctacgacaaggtctcactggggcggctgcgcttctggatccacatgcaggacaccgtgtactccctgcagcagttcgggttttcagagaaagatgctgatgaggtgaaaggaatttttgtagataccaacttatacttcctggcgctgaccttctttgtcgcagcgttccatcttctctttgatttcctggccttt

SEQ ID NO: 1517 - DNA, 182 bp, Homo sapiens
ccaacatctaatttttttactttttaattatagctgttgtgactgatgtgagatggcatcttactgtggtttttgcttgcatttatttatttgatgattagtaaggatgagtgttttttcatatacttgagtgtcttcttttgagaaaatatctgttcatgtcctttgccttttcttgattt

SEQ ID NO: 1518 - DNA, 548 bp, Homo sapiens
cctgagggagagggaaaagcggatacccacctgtgtcgctgtttgcgtgccaagtccaggaacagtccatacagccctgctgcatcccacgacgctgtcacaaagcaggagttcatccgaggccaaggtgttgtcatgagaatattcgttaaagtagggacgctgactttgttcttgggcagattctcttcctgtggagtatccagcctgtttgcctagttttcctgttcttctggggtctgatctctatctgttttactgcagtccagttaccaaagtggtataagtaaaattgaaagaattctaaataccttttccccccacgttagctgcctcacgttaatgtggtcttacggtctgcaaataagtgttttgatgatttggcgactgcagttacccatactagctctcctaccactcactactgacagttaattattatcgaatatccacccacccagggtgagttataagttataccaggtgttttggttaataatactaatgcaattaatttactggttactctctcatcttaaagtaatcag

SEQ ID NO: 1519 - DNA, 491 bp, Homo sapiens
ctggtgaaggacggcttcctggtggaagtgtcagagagctcccggaagctgcggcacgtcttcctctttacagatgtcctactgtgtgccaagctgaagaagacctctgcagggaagcaccagcagtatgactgtaagtggtacatccccctggccgacctggtgtttccatcccccgaggaatctgaggccagcccccaggtgcaccccttcccagaccatgagctggaggacatgaagatgaagatctctgccctcaagagtgaaatccagaaggagaaagccaacaaaggccagagccgggccatcgagcgcctgaagaagaagatgtttgagaatgagttcctgctgctgctcaactcccccacaatcccgttcaggatccacaatcggaatggaaagagttacctgttcctacttgtcctcggactacgagaggtcagagtgggagagaagcaatttcagaaactacagaagaaaggatcttcagg

SEQ ID NO: 1520 - DNA, 169 bp, Homo sapiens
ctggtactgtcgatttggaaagctggctggaaaaaacttattcatgaaggggctgatggtgtgggacagggccaggattcccagcacgaagaaatacatggacagcaggaggttgatgtactcctgggagaatattttgaaaaagaggtagagccccaagagtgtgcag

SEQ ID NO: 1521 - DNA, 293 bp, Homo sapiens
aggacgacgctgtcrgargcagggagagcaaattaccacagcttcttggcccagttctgcccttctttgctttgggattgcactgggccatcagctcatgccaggctatgggggcagccagttggcattgctccccagactgaacagaaacctggccgccggatgggacctcctttggcacagacttgactgtgtaactgcataaactgcagtagcatcattgccctagatgccccaggagacctggcaccatgaggattacagacagtggaatcttactgtcatctggacag

SEQ ID NO: 1522 - DNA, 386 bp, Homo sapiens
ccacgtgggactttgaagacagcacaacacagtccttccgctggcatccgctccgggccaaggcggagaaatacgaagacagcgttcctcagagtaatggagagctcacagtccgggctaagctggttctcccttcacggcccagaaaactccaagaggctcaagaagggacagatcagccatcacttcatggtcaactttgtttggtagtgctaggagccaagaatttacctgtgcggccagatggcaccttgaactcatttgttaagggctgtctcactctgccagaccaacaaaaactgagactgaagtcgccagtcctgaggaagcaggcttgcccccagtggaaacactcatttgtcttcagtggcgtaaccccagctcag

SEQ ID NO: 1523 - DNA, 178 bp, Homo sapiens
aaaaagcctatcccatactgaattgtgggaacctatgaagtgtctcttaatgtcaattaaaagtaacagtggctgcagatattgatttctgaaagtacatgagaatttgtctctaactatggttgaaacaacaaaaccaaatctgaatcaggtagaggtctaccagacacaaactctg

SEQ ID NO: 1524 - DNA, 319 bp, Homo sapiens
wycacagcwgaaatggggcactgaagtgtggagscacakaatgcgggagggcagaaccacagacaggaggctgagattgacctcctgagtgcaagctggtctccccttcacctcctgcaccctacgcagatggtgcttaccataggattgccgtaaaacagagacacgcaccagcgagaaactttagcccttagtatcccatcctcaggacagaatcactcttaaacatgttgaaatacatctgcttagagcttttctatgtgtctatataatgtatgcataatatacaattagaagcatgtgattttataacattttt

SEQ ID NO: 1525 - DNA, 467 bp, Homo sapiens
ccagactagacagagatcaggtcatcaggggagcttccgagcttcagcaaagcccacaggtagctctgcgaactcagaatgctaccctaccttccctgcaggccgctgttcatgtctggactcctgggggcgctatttaatgtttacccccatctccagtgccccctccaaggctgtgcagtgtcttggggctctcagggccaacatcgaagagatgggggccacctcttaacacctggcaacagtctcccctcatcctgattcctgacaacagacaaaacaccggtttctagggtttatctgtttgttttttgagttgagggttcctcagggccttggcattgctagtgatggtcccctttgctgtgtgagaaccccctcaaccccttcctcctccctctggggatgaagtgggagtatttggctccccatttttgacaaaagggctcagtgcagggaggtggagg

SEQ ID NO: 1526 - DNA, 439 bp, Homo sapiens
aaactgtttactggagaaaatcctcgctcatgtccatttattgtttttttctgtactgtgatttgtttcaagcttaggaaaactagtatattagagtatgttctaggaaattaaaagatctggttagagtaaaaagttctttttaaggttcttaactaattttttcacaactaagaaaataaatgaagtattcttaggctgaaattcatcttattttatcataaattagattgtaggggcagcctacatttttgtgtatgtgtttttatttcttaaatgattgtgtgagcctggtgacattttatggttcttgtgatctaaactgtttttccaattcacatcttttgtcgtgaagtgatattatactagagtactgtttgcattgtaaaaatgctttgctggtgctctggcattttgtctttatctcatcacctaattt

SEQ ID NO: 1527 - DNA, 609 bp, Homo sapiens
  misc_feature 582: n = A,T,C or G
ctggagaacttgggctccattaggtgcaatcgttggagtaattagcccatcttttacatttcttgccacaaaatctcgaagagctgccatttcaggttcggacagtgaatacacatgtccactgggaatactgtgtgctccaggtatcatttctatgtgagggtcaaccaggcggtgatctgggtagacgtgctcatctactggagtgtacacattctggacatagtaatacctcactggttggtaaactctgtatccatctactggataatagagtggcggttgtggtgctggtggtgggagcgatggtggtattggagaatacatccggcagtggtagcggcagtattcagaatcaaagacgatagatcgagtgctccatgtgatattgggatcatgtgtgctcagccagcgaacccctaggacgacagggaagaatggagactgagtcacatcaaatgacagcacctctcggtgatctcccaggtcaactatcaggtcgtgagtttcgtggacaactgggcccgatgctatggggcgcccatcaattgcttccacaagtattggacccgcccgggcggncgctcgcaagggccgaaattccagcac

SEQ ID NO: 1528 - DNA, 393 bp, Homo sapiens
tgatgtaatgaattcatatttattgatacagaaaaatatgatataatccatctaaaaagcaagttacaaaacagtgtacagtgtaccatagtacctatgaacacaattagtgaagtaatttgcagagctataataccaaatcagaaattattttggtaatgaatttatgattttcctcgttttctgattttttccatgatctcatatactttattctcagaaaacaaaagacaaaaccccacacatacacaaaaataaacgagtaacttctttacaaccccagaggctaagtcagtgggaaaagagggaaatgaatggttatgagcataaacacagggacaaataaaagaagtttggagcacagagaacaattcacaaatcagaagtcatttt

SEQ ID NO: 1529 - DNA, 143 bp, Homo sapiens
atccgatagaatccagttcaatgaccttcagtctttactctgtgcaactcttcagaatgttcttcggaaagtgcaacatcaagatgctttgcagatctctgatgtggttatggcctccctgttaaggatgttccaaagcacag

SEQ ID NO: 1530 - DNA, 636 bp, Homo sapiens
  misc_feature 330, 504, 583, 591, 625: n = A,T,C or G
gtggagaagcggcttggtcgggggtggtctcgtggggtcctgcctgtttagtcgctttcagggttcttgagccccttcacgaccgtcaccatggaagtgtcaccattgcagcctgtaaatgaaaatatgcaagtcaacaaaataaagaaaaatgaagatgctaagaaaagactgtctgttgaaagaatctatcaaaagaaaacacaattggaacatattttgctccgcccagacacctacattggttctgtggaattagtgacccagcaaatgtgggtttacgatgaagatgttggcattaactatagggaagtcacttttgttcctggnttgtacaaaatctttgatgagattctagttaatgctgcggacaacaaacaaagggacccaaaaatgtcttgtattagagtccaattgatccggaaaacaatttaattagtatatggaataatggaaaaggtattcctgttgttgaacacaaagctgaaaagatgtatgtcccmnctctcatatttggacagctcctaacttctagtaactatgatgatgatgaaaagaaagggacaggtggtcsaaatggctnttgagccnaattgtgtaacatattcagtacccaatttactgngggaaacagcc

SEQ ID NO: 1531 - DNA, 194 bp, Homo sapiens
aaaaggcagagcattcttttttcggcaattttgataagcaaggtgtagatttacatttttgtccttgctcccaacgaaatggataaacaaaaataacttaccatctactcatggaatgttgttgtgttagccagtctgaaggcccaccttaatttttatataactgtctttagctcttcttttgacagggcagg

SEQ ID NO: 1532 - DNA, 300 bp, Homo sapiens
ccatacaaggtaattttgacaggttcctgggattaggacatgggcatcttgggaggccactactggcctaccacaactgggcagcaaaactattacaccctccggtataatagttttggtgtttcaatgactgggaggaaaagggttggaattttttgctttggggtccctcttaaccttgtatttttaaggtctgggactcaccaaccctccccttccaaccagagaaactcactgcagtatctccttgaaagtctggtgacgagtctgtctaagtgctggtgagaggcacaggaccaa

SEQ ID NO: 1533 - DNA, 521 bp, Homo sapiens
gttcctttgcaccctgtagatgttctaggatagttgatgcatgttactaaattacgtatgcaagtctgtgagtgcgtctgaggggacatcgccaaggactgactgagacacgatgccgagacctcaagccctgaggggcagtcccaaaacccttacagtgaagatgtttactcattgcccccacctctggtccacactagaaagaagctcgccccacctccacctgtgagatccgtgaattctcggaatggcaggggaagccttgcactaggttgcagagaagcatcctccacatcctgtgtcagaaaccctggtctccgtggcacttgtaactcaccgtgctgtcttctggtctgtgtgtgttcttcaagccagctctaggcttcaggccgagccaggttcacactcagaaagatgtctccccatccccattcggggctgacgatggggggctgatggctgcccctgcgtggcctgagtcctggtccctctgaggcagttgacggggcagtcagattttt

SEQ ID NO: 1534 - DNA, 181 bp, Homo sapiens
actcaagaagatgtatttaatgcttgacaataagagaaaggaagtagttcacaaaataatagagttgctgaatgtcactgaacttacccagaatgccctgattaatgatgaactagtggagtggaagcggagacagcagagcgcctgtattggggggccgcccaatgcttgcttggatcag

SEQ ID NO: 1535 - DNA, 544 bp, Homo sapiens
aaaataggacactaaatcctactctgaaaggtggtttgatcaggactaaagagaatgtatgtagagtgctttgtgcaacgaattgtggggagcttggacccaataaggtagccagaattacccacaccatcatcatcttcaccaccatcattattgttatcgacatattccaatacacttctgaagggctggaagagagaaatatgtttgtgcagacaggcggcagcagtatttgatccaccaccacagctccaccgcttgggggcagtactgatccacctgtgctcccctccctgccccagcctggaaagctaatttcagactcaaaaaaatcaagtacagagcagcgcacccactccaatgagtcatccccgcccactctagacaacagcatgctcatgactcaaactatcttcgtgaatggttcaaaatatcaagaattggtttccatagtttcttgactaaccagacacaaaatttcccctacatgcagagattcatgtctcaacttcaactgtacattaaactcaaccgggaaactttt

SEQ ID NO: 1536 - DNA, 591 bp, Homo sapiens
ctgagttaagatggtaaagccaatattattttaggaggaaagaggacgaaggccaatgaaccaacatctgcctgctatctggtgcatcacccaaggtgaccaatggctgggcacaaataaacttctcttttgctagccacagagttgctcactgtggcaagcctgagctggtcagaacacctgtgtgtgtgttcctgatacacactaaccacaataagcaagtctgcacacatctctatgagccccatgcaaagacaagacattcccaaagatcagtcactagagtgcaacaacgaaattcaagatttgaccaaaacagaccctgctgcctcctaaattgccaattgcctctcaaaaacttacagaaaaagggacattataagaattcatagagggagagaagaaaaagctgctactcctagtcattagtacaatgtgctgtgttaattagatacctctatataaattagaaaaagtgctttacttgcatgcttcaataaaatgaatactgagtgtcgtagtgttagatctgtacagatataaattttttgcagctatataaaagtgtataagatgggcttttgccatttt

SEQ ID NO: 1537 - DNA, 341 bp, Homo sapiens
acttcgggcctccctctccctgtgcagaccggttgaataaatgataaaattactgtttgtgtcctctgtgaagtctggattaatggaaaaaaggatttgtgaggctagtcttaggctgtagccaatctggtgtgctttttgtgtcttcctgtatggttccatgataaggaggaataccttaggatagaatgcaagcctaggaccccataagcctgttgttcaagccaaccagcaaactgggcagtaacaaacattgctgcaggtttccattttgttttacgtccttgggagcttgaccttgtaaccacgtggcagtaccttcttttggcctctgccatttt

SEQ ID NO: 1538 - DNA, 363 bp, Homo sapiens
ggacctgactttgagtccatcagagacaaagtgagtgagatgcacatacagtgtttccagacctgactcagcccatctgtctgttaggaaactttatgaagacgccccccagaattaaaccctaattcaaatgtctcactctgaatagagaccttctgaaataatcttggtatagagacccagacacgtgccttttgccttaaaataaaaatatttagcccatgttgttttatgtatctgtctttcagttagttttgaaggcccgcacggaaaagtggggcctgtgcacctgaaaagaaatgtgtatgttatgtggttgttggtctttcctactagagttatcttgataattgtgaagagtgg

SEQ ID NO: 1539 - DNA, 371 bp, Homo sapiens
ctgtgggggtccttccagagaggagctgagatacgcctacctggaggggcccctgggcctggaggggctcctcagtgtgactgggtgaagtgttttcagaggaccagggttgaggttgggggcatctcatccagaccctgccggcatctgccccagaacccaagggcccctccttcctccctcctcaatggaaatgctggagatgtcctcagtcaccctctgagcactcacacatcaccccttatttggaaatttttctcactctaaccttccttcctgctgcaccttctgccccatccccaggctctggcctctctctctcctcttctaccctttagcaggtaatgactcagttcccactgaggagccag

SEQ ID NO: 1540 - DNA, 403 bp, Homo sapiens
ctkgacgtgatggagcaggtgagcagtgcccgtggggcttgccagagggctgaggaggaccctctctaaccagctccctgtcccccttcttctgtagcttgagttgaagaagacactgctggacaggatggttcacctgctgagtcgaggttatgtacttcctgttgtcagttacatccgaaagtgtctggagaagctggacactgacatttcactcattcgctattttgtcactgaggtcagcaatgcaccgttggtttcatgtttcatactgtttacactagcactgccctttttggcttaatttagttcattttgtacctaactgagaactgtgctttctgatgtagtgatgacaatgacagatactcgtttaccaaaaagcaccttctgcctgcagcag

SEQ ID NO: 1541 - DNA, 428 bp, Homo sapiens
taaaacaaaactaaagaagagaaaatatattctcgtaaattatctgaacttaaaagatggaagcctggagatagatttgtgataagccattgctgagtacatcctagagttcttgataatttcagttggttaaattacaatagtttgctatttcctccctcacattttatgttctacagtatctagctgcttgggttttcctgtataccatggggcttctgtcatctgggctttactcagtggcatattccctctgcctaaaactctcctcccctctccaccttagaagtagcttttcctagaacggttttcccagggtttcacctaaggtgatagtacaatctacagggacctgcacatgaagacctttgcatacatgccaggaagttggactttatctttggaaaaagggagcctttgaaggtttt

SEQ ID NO: 1542 - DNA, 345 bp, Homo sapiens
awttaaatgcttagcaagcagcaattccacgatggtcaaattcctaatatgagagaagtagaaataggaaaaataggtcaccctgatacttatgttttcattttgcttaatatacgtttgtatatttcaatataacattaatagatatcgtgtcccttcacagttctaaagtagtaagcaaaatgaattaatttaacctatgcaattaaaaccaatttggaagaatattgaggtagcacactgttacgggaattagtatgactcagtaatgcagttgaaagttagtggctcctaatccagtatgaatcatggagatgagagaaatgattagataaagagatattt

SEQ ID NO: 1543 - DNA, 420 bp, Homo sapiens
aatattgaatttctagaagcagtatattgcttactgcttcttaattacgttatagatgaggtggaaatgataaaaactaaagaagcaagattaatctttaacacacatttcaggctgttgtaaaagaataaacaatgcttcatataaacttctagcaaatgacttcctaatgaggtcttgaaacagtctttagggcacggaatgtcatcacataattaagcagctttaagcctttattaaaaggcttaaagtcgcaaacaatgaaatctgaaacaaactgtaccatattaaactttttgatgatatttcaaattcagtaaaagaaaaaaaggatggttcagaataacatcacgtattctaatcctgaaacacataacaaatgcatctgaaacagcaattcttaaaaaggttttgcccttt

SEQ ID NO: 1544 - DNA, 306 bp, Homo sapiens
ctggcttcactcctactccctctctgctcgcagcacgtcggccgccagctctttgatgtgttcccaggcccgctgcacatgggcagattccaccgtgcgagaacagatggcaaagcgcaggacaaacttgtccctgaggtgacatggaaccaagtggatttttttggcactgtttattctttgcagaagagcttcattcactttgttggaaccctttagccgaaagcagacaagccccagaatgacttccacacagatttcaaagcggggatcctggcgcaccagtgactcaaactcatgggacag

SEQ ID NO: 1545 - DNA, 110 bp, Homo sapiens
ctgctccgggccttcatcctgaagatcagcgtgtgcgatgccgtcctggaccacaaccccccaggctgtaccttcacagtcctggtgcacacgagagaagccgccactcg

SEQ ID NO: 1546 - DNA, 239 bp, Homo sapiens
aaagaaatatgacacggtgttggatattctaagagacttttttgaactcagacttaaatattatggattaagaaaagaatggctcctaggaatgcttggtgctgaatctgctaaactgaataatcaggctcgctttatcttagagaaaatagatggcaaaataatcattgaaaataagcctaagaaagaattaattaaagttctgattcagaggggatatgattcggatcctgtgaagg

SEQ ID NO: 1547 - DNA, 527 bp, Homo sapiens
aaaaattccagttgagatttttctggttctctgtataaagattgactggaacatatacattttggggtttatgtttggagactttggctcttattcaaaccttccattttagttggcttcttctgacagtgcttcagcatggaagcaaggagggggcctcattactgccaggtaagggtaaaaatctagtttctctgctgggtctccattgtcactaagaaaggaatggctctgttattgctgggcagggttggctgttccaactgataatcctatgtctgggagggctaggagtgcctccttgctgttcctcttgttgtttccactgacagtggagtggccttgttactgctgggtggtggttgagagttctggctctctactagggaggacacaacctcagtgtagagaggcggggataccttgttactgtcaggcacaggcggaggtccagtctccttactccacctacccaacagggtagcttgaggcacttcattattgcctagtgagagtggaagtttagg

SEQ ID NO: 1548 - DNA, 333 bp, Homo sapiens
ctgtgggcggagctagtaggggcggggctacgtgattgacacttctctcctcagacttcaagggctaccactggacccttcccctgtcttgaaccctgagccggcaccatgcacggacgcctgaaggtgaagacgtcagaagagcaggcggaggccaaaaggctagagcgagagcagaagctgaagctataccagtcagccacccaggccgtattccagaagcgccaggctggtgagctggatgagtccgtgctggaactgacaagccagattctgggagccaaccctgattttgccaccctctggaactgccgacgagaggtgctccagcag

SEQ ID NO: 1549 - DNA, 438 bp, Homo sapiens
ttgacagtgtacgctggagcaggttccagggtggggctgccctgccgcctgcctgctggtgtggggacccggtctttcctcactgccaagtggactcctcctgggggaggccctgacctcctggtgactggagacaatggcgactttacccttcgactagaggatgtgagccaggcccaggctgggacctacacctgccatatccatctgcaggaacagcagctcaatgccactgtcacattggcaatcatcacagtgactcccaaatcctttgggtcacctggatccctggggaagctgctttgtgaggtgactccagtatctggacaagaacgctttgtgtggagctctctggacaccccatcccagaggagtttctcaggaccttggctggaggcacaggaggcccagctcctttcccagccttggcaatgccag

SEQ ID NO: 1550 - DNA, 204 bp, Homo sapiens
aaaactaagttattccaacactaaaagcatacaacagcatgccaacagtaatatattattctccaagactttacctatgtaagtgttcaaaactctgcagcattaaacaacgtgtatgcaaattgttatggatacatttcagaatctaagaaatcaggcaagtgcttaaaaggccaacggtccaagggattacatctgcagttt

SEQ ID NO: 1551 - DNA, 132 bp, Homo sapiens
ccatctgtggatttgtctgtgcacctattggctcttctagctgactcttctggttgggcttagagtctgcctgtttctgctagctccgtgtttagtccacttgggtcatcagctctgccaagctgagcctgg

SEQ ID NO: 1552 - DNA, 433 bp, Homo sapiens
ctgaatagaggtcaacacagttgcgatgttgagggatggtctccaagcaccttttggtggcaatttgagaacatccagacaaatccttccagcagaatcaatgtttggatgataaattggagtgagaaatcggatctgaggaggttcaaatgggtacctctcaggaatgataacttctagcttaaaaacacctttctcataaggtgtgttggctccacctaatatttgagctcgcaggtcatccatttggtctttatcttgccaacatgtgatgcctgggggtggctctgtggctaacatgtgcagctctctcttcagacgtgaagctctctgcatgatccccaagtagaaggaaccacacacagttcactgctccacactaagagctgsctgggatgcactgagctgacacccctcacaacgcagcaacgcg

SEQ ID NO: 1553 - DNA, 316 bp, Homo sapiens
gagcaaggtctgctgagaacagacccagtccctgaggaaggagaagatgttgctgccacgatcagtgccacagagaccctctcggaagaggagcaggaagagctaagaagagaacttgcaaaggtagaagaagaaatccagactctgtctcaagtgttagcagcaaaagagaagcatctagcagagatcaagcggaaacttggaatcaattctctacaggaactaaaacagaacattgccaaagggtggcaagacgtgacagcaacatctgcttacaagaagacatctgaaaccttatcccaggctggacagaagg

SEQ ID NO: 1554 - DNA, 542 bp, Homo sapiens
  misc_feature 517, 532: n = A,T,C or G
aaaggaattattctggcagcacatgtagtattcttggatgatcttgctgctcttatttctccttttgtgtgtgtgtgtgtgtgtgtggctatgggttttcatttgtaactccatctgcttargagagtgggctctctataagggaacctgctgtaaacttcattgcagcaaggatgtagagagaaataggacttaattccactaggggctctcatctcacaccttaaggaggagatttctagaaaaactgggccagattttctttgytctccatcattttaatgtggcaggctgytcagttttcttactcttacctatgwgatatttcttcgtaacgtgtccaaaaagaaaaaagacccaatcagtgtctcttgactttgttctttgatccctcagtttcttcttgatttcagcatgtgtccgggttcctaattttgggtatgagttagcaaatttaaccattgtgtttgtgccctacccaggggactccccagtttctgacttgaagtagactganaagaatccacgaggngctattttgg

SEQ ID NO: 1555 - DNA, 117 bp, Homo sapiens
ctgtctgtggcttcccatgtctttctccaaagttatccagagggttgtgattttgtctgcttagtatctcatcaacaaagaaatattatttgctaattaaaaagttaatcttcatgg

SEQ ID NO: 1556 - DNA, 111 bp, Homo sapiens
ctgctgcagccgcagtttctcatccggagtgtaccccgtcatgtcgccgctggtaccaacgcaaaaggacacggcgcaccctcgaactacggactagttacttaagcgcgc

SEQ ID NO: 1557 - DNA, 454 bp, Homo sapiens
cgaggactgatcctctagtactaagtgactggggatattacaytarccaacattggttgatacatacctkartmatcatwtgaggaygcagtgataarsgsatawwmywgtatsatccyaacaygyactarctcaaaaactagtgggggcggattgatctcctgtgggacwkcacatgscctgaaagtgaacatgmtcmtratcacctgcagrgcttgagatggyccmcatkgcwgcactccgccccyacaktttttgawtcwacwggagttaggswgmtyctwgawttakcctttctacctgcctccygakagrwgcwcwygastwggakgaatssattgackkctaagrttakacttccactaactctgtacgmtgarctcttactaatattcgttaccacgctaagaggctctgctccaggatctcatcgcgactggaaggaacctccagc

SEQ ID NO: 1558 - DNA, 404 bp, Homo sapiens
aaagaagtgcagttgatatctaatttacacagtgaaactagtgatagaaaataactaatgaaaaaaaatcagagactggtttccaattgattgacacctagatctgtcagcctctcttaaagaaaggggaaggagaaaaaaaatctcatcatggaaggcagacaagagtccacctgacagaggtggaatctgatggaatctgaccccatttcatgataaacgagaggaaacataaatgccatctcaaatactaaagcgatgtagtgtagcatgagtgactcaatgcaaattcacagaggaaaagaagttacggcttaggaagtaggacaataaatacaaatatttcatcttatttaatggtgcatgacttcagtgaaactaccctttgcaatgcaataaatttt

SEQ ID NO: 1559 - DNA, 266 bp, Homo sapiens
aaactatcagaagagatgagagggaattgatctacaatactagaattttatgtgcagacaaatccacatctggaaatgaaatcacagtaagatattttcgggagaccaaaacataaaaattgctagaataaatttgccacgaacgagtaactagacattagaaattgactacatagatatagtaatactaaaagtgctgaaaacaagcaaacacaacacacacattctcaattctttttttttctatcaaatatcttcaacttttt

SEQ ID NO: 1560 - DNA, 142 bp, Homo sapiens
aaaactcagtatcttctgaaccagaggcatttctgattagcccttccctacctattttcctagtatcactctttaatcagcttggggaggtggcagcatttcatggcctccgtagtaactcacaatgcttcctggggtattt

SEQ ID NO: 1561 - DNA, 381 bp, Homo sapiens
aaacactaaatgaagcttctcacaatttctaattataaacaaaaggctgaaaacagtatgggaaacaaagtttcaaaacaaagaaaagttgagtaaaaggtgccccctctatggctcatctgaaagaaacattttactcagagaggcaaacatttctgatctaggagtaagtttcccactcactttgcaaggacccactcattctgcagaaagacctacaagtctttctggtctcaattgcaaagtacgtgaaaatgtgtatgaaagatctaaaagctaaatattagaataaggctaattgaaatcaaaattgtgtgctggtctaaatatacatcttcggcttcttcctttttagtaagtatttttatttcagatgtattt

SEQ ID NO: 1562 - DNA, 368 bp, Homo sapiens
ggagaaaggagaaccgtacatgagcattcagcctgctgaagatccagatgattatgatgatggcttttcaatgaagcatacagccaccgcccgtttccagagaaaccaccgcctcatcagtgaaattcttagtgagagtgtggtgccagacgttcggtcagttgtcacaacagctagaatgcaggtcctcaaacggcaggtccagtccttaatggttcatcagcgaaaactagaagctgaacttcttcaaatagaggaacgacaccaggagaagaagaggaaattcctggaaagcacagattcatttaacaatgaacttaaaaggttgtgcggtctgaaagtagaagtggatatggagaaaattgcag

SEQ ID NO: 1563 - DNA, 411 bp, Homo sapiens
  misc_feature 32, 332, 333, 346, 361, 381: n = A,T,C or G
accwtrsaactgcawttattacctatgctagntttggataagaamtgkycwtayatgtgakagcaagagggcacyarawswrcttsaacaccaawgggcmktactwtatakawmcgawgggcatgctwtmatgaccaactgrmtgactgtttgagaatggacaargtgctagcgctaaacctgtccttcttgaacrtggcttgactaacgkcwttgatacgttrccttcakkasaatactattactasactttgktgcttgattaccgactggtgcactcttgmtctcacctatgargacagtgctttacacaaactcrtakggaaaattgnntttgtmctgtganctactcatcygaganctccctaagggctaacattncatgtttccgtctcactagctacacgttct

SEQ ID NO: 1564 - DNA, 602 bp, Homo sapiens
  misc_feature 597, 598: n = A,T,C or G
ctagttttaagatcagagttcactttctttggactctgcctatattttcttacctgaacttttgcaagttttcaggtaaacctcagctcaggactgctatttagctcctcttaagaagattaaaagagaaaaaaaaaggcccttttaaaaatagtatacacttattttaagtgaaaagcagagaattttatttatagctaattttagctatctgtaaccaagatggatgcaaagaggctagtgcctcagagagaactgtacggggtttgtgactggaaaaagttacgttcccattctaattaatgccctttcttatttaaaaacaaaaccaaatgatatctaagtagttctcagcaataataataatgacgataatacttcttttccacatctcattgtcactgacatttaatggtactgtatattacttaatttattgaagattattatttatgtcttattaggacactatggttataaactgtgtttaagcctacaatcattgatttttttttgttatgtcacaatcagtatattttctttggggttacctctctgaatattatgtaaacaatccaaagaaatgattgtattaannattt

SEQ ID NO: 1565 - DNA, 473 bp, Homo sapiens
  misc_feature 214, 291, 295, 345, 375, 442: n = A,T,C or G
ctagtccagtgtggtggaattcatccagggggctacccctggctctctgttgccagtggtcatcatcgcagtgggtgtcttcctcttcctggtggcttttgtgggctgctgcggggcctgcaaggagaactattgtcttatgatcacgtttgccatctttctgtctcttatcatgttggtggaggtggccgcagccattgctggctatgtgttnagagataaggtgatgtcagagtttaataacaacttccggcagcagatggagaattacccgaaaaacaaccacactgnttcnatcctggacaggatgcaggcagattttaagtgctgtggggctgctaactncacagattgggagaaaatcccttccatgtngaagaaccgagtccccgactcctgctgcattaatgttactgtgggctgtgggattaatttcaacganaaggcgatccataaggagggctgtgtggaga

SEQ ID NO: 1566 - DNA, 53 bp, Homo sapiens
  misc_feature 15, 24, 28: n = A,T,C or G
ctagttattaatagnaatcaattncggngtcattagttcatagcccatatatg

SEQ ID NO: 1567 - DNA, 136 bp, Homo sapiens
  misc_feature 91, 104, 117, 126: n = A,T,C or G
ttattgatttttttttttcactttccccatcacactcacacgcacgctcacactttttatttgccataatgaaccgtccagcccctgtggngatctcctatganaacatgcgttttntgataactnacaaccctac

SEQ ID NO: 1568 - DNA, 192 bp, Homo sapiens
  misc_feature 4, 16, 17, 48, 52, 57, 82, 91, 98, 109, 123, 151, 155, 162,166, 168: n = A,T,C or G
ttgngtctgtgtgagnnggttgaccttcctccatcccctggtccttcncttnccttnccgaggcacagagagacagggcagnatccacgtncccattntggaggcaganaaaagagaaagtgntttatatacggtacttatttaatatccntttntaattanaaantnaaacagttaatttaattaaagagt

SEQ ID NO: 1569 - DNA, 575 bp, Homo sapiens
  misc_feature 358, 505, 511, 513, 547: n = A,T,C or G
ctagttctgtccccccaggagacctggttgtgtctgtgtgagtggttgaccttcctccatcccctggtccttcccttcccttcccgaggcacagagagacagggcaggatccacgtgcccattgtggaggcagagaaaagagaaagtgttttatatacggtacttatttaatatccctttttaattagaaattaaaacagttaatttaattaaagagtagggttttttttcagtattcttggttaatatttaatttcaactatttatgagatgtatcttttgctctctcttgctctcttatttgtaccggtttttgtatataaaattcatgtttccaatctctctctccctgatcggngacagtcactagcttatcttgaacagatatttaattttgctaacactcagctctgccctccccgatcccctggctccccagcacacattcctttgaaataaggtttcaatatacatctacatactatatatatatttggcaacttgnatttgngngtatatatatatatatatgtttatgtatatatgngattctgataaaatagacattgctattc

SEQ ID NO: 1570 - DNA, 392 bp, Homo sapiens
  misc_feature 10, 114, 374: n = A,T,C or G
ctagtccagngtggtggaattccgccgccatcatgggtcgcatgcatgctcccgggaagggcctgtcccagtcggctttaccctatcgacgcagcgtccccacttggttgaagntgacatctgacgacgtgaaggagcagatttacaaactggccaagaagggccttactccttcacagatcggtgtaatcctgagagattcacatggtgttgcacaagtacgttttgtgacaggcaataaaattttaagaattcttaagtctaagggacttgctcctgatcttcctgaagatctctaccatttaattaagaaagcagttgctgttcgaaagcatcttgagaggaacagaaaggataaggatgctaaattccgnctgattctaatagagagc

SEQ ID NO: 1571 - DNA, 390 bp, Homo sapiens
gaaggacgtttgtgttggaagccctggtatccccggcactcctggatcccacggcctgccaggcagggacgggagagatggtgtcaaaggagaccctggccctccgggccccatgggtccacctggagaaatgccatgtcctcctggaaatgatgggctgcctggagcccctggtatccctggagagtgtggagagaagggggagcctggcgagaggggccctccagggcttccagctcatctagatgaggagctccaagccacactccacgactttagacatcaaatcctgcagacaaggggagccctcagtctgcagggctccataatgacagtaggagagaaggtcttctccagcaatgggcagtccatcacttttgatgccattca

SEQ ID NO: 1572 - DNA, 383 bp, Homo sapiens
  misc_feature 368: n = A,T,C or G
ctgcagcttctgctgctgaggccgggattgctacgactgggactgaaggtgaaagaggtggaatccgaagtcctgggactgcgggatgctaaacattgaaagctgggtgtaggcactgcagggagagtgtggaggtctgacagggtaggaatatgtgggagggctgggctaggaatggccttggaggctggcctgtgtggatatggcaccaattctaccctgctcctcttttccttttcccagactcagacgatgccctgctgaagatgaccatcagccagcaagagtttggccgcactgggcttcctgacctaagcagtatgactgaggaagagcagattgcttatgccatgcagatgtccctgcangggagcagagtttgg

SEQ ID NO: 1573 - DNA, 149 bp, Homo sapiens
cctccagagcctctctagtggcagagcagctcacactccctccgctgggaacgatggcttctgcctagtacctatccttgtgtttctgatgcagtggtagcattggttcaagttctctcctgctgtggtcagagttgcttcgatgttgg

SEQ ID NO: 1574 - DNA, 143 bp, Homo sapiens
ctgccaggctgaaaagaagcctcagctcccacaccgccctcctcaccgcccttcctcgggagtcacttccactggtggaccacgggcccccagccctgtgtcggccttgtctgtctcagctcaaccacagtctgacaccagag

SEQ ID NO: 1575 - DNA, 112 bp, Homo sapiens
ctgcatccaccctctttcagggggtagagccactatacttctcatgtagatcagccacattgtcactggagactcggatccagccatcctcccgcacgtggtagaggttgac

SEQ ID NO: 1576 - DNA, 198 bp, Homo sapiens
ccagtatgtccccaggattatgtttgttgacccatctctgacagttagagccgatatcactggaagatattcaaatcgtctctatgcttacgaacctgcagatacagctctgttgcttgacaacatgaagaaagctctcaagttgctgaagactgaattgtaaagaaaaaaaatctccaggcccttctgtctgtcagg

SEQ ID NO: 1577 - DNA, 444 bp, Homo sapiens
cctgcctggagccccagatcaccccttcctactacaccacttctgacgctgtcatttccactgagaccgtcttcattgtggagatctccctgacatgcaagaacagggtccagaacatggctctctatgctgacgtcggtggaaaacaattccctgtcactcgaggccaggatgtggggcgtcatcaggtgtcctggagcctggaccacaagagcgcccacgcaggcacctatgaggttagattcttcgacgaggagtcctacagcctcctcaggaaggctcagaggaataacgaggacatttccatcatcccgcctctgtttacagtcagcgtggaccatcggggcacttggaacgggccctgggtgtccactgaggtgctggctgcggcgatcggccttgtgatctactacttggccttcagtgcgaagagccacatccagg

SEQ ID NO: 1578 - DNA, 294 bp, Homo sapiens; identical to SEQ ID NO: 1031

SEQ ID NO: 1579 - DNA, 295 bp, Homo sapiens
  misc_feature 176, 181, 182, 248: n = A,T,C or G
ccacaaagccattgtatgtagctttagctcagcgcaaagaagagcgccaggctcacctcactaaccagtatatgcagagaatggcaagtgtacgagctgtgcccaaccctgtaatcaacccctaccagccagcacctccttcaggttacttcatggcagctatcccacagactcanaaccnngctgcatactatcctcctagccaaattgctcaactaagaccaagtccccgctggactgctcagggngccagacctcatccattccaaaaatatgcccggtgctatccgcccag

SEQ ID NO: 1580 - DNA, 166 bp, Homo sapiens
cttctttattggggacatgtgggctggaacagcagatttcagctacatatatgaacaaatcctttattattattataattatttttttgcgtgaaagtgttacatattctttcacttgtatgtacagagaggtttttctgaatatttattttaagggttaaatcac

SEQ ID NO: 1581 - DNA, 449 bp, Homo sapiens
  misc_feature 420: n = A,T,C or G
ctgaggcaacagaataaatgcagaggcattacaatgaatcccacttaatataaagaactatacagaccaacacttctctacaaaatttttttttcctcattgccagttaaatacagagttttactttcatagcttaacaatgaagggtcatacactgaagccaatacatatacctagcatttcagtctaagcttgtccacgtacatagctgaagtcaattacaaggtttggcctagaaatgctaggggaacttctttgtagtttttacaggtattaaacttcatcttgcacactgaagtcatcatacatacagggcaaaatcagagcttttatatttgcgtttattcttcatttaactttttataacactactatagtttattaaaacaaaaaacaaagagcaagtagtgagcatattangattacagtcctttcactcattcacacct

SEQ ID NO: 1582 - DNA, 302 bp, Homo sapiens
ccaatgggctttgctgtagcttgctgaaatcaccaagcaggagagatttaaccagaggcgatgtgtccagtcaccagcatagagccatcctctgtgtcaccatccacacgcagggccttctggcagacctcatgcaatgccctccatgttaatattcatcagaaaatggataattaggggggccagcaaaaatatcaagggtcaaatatcgcacatttctgtttaggccatctatggctttcatctcctctgaagtcaactggaattcaaacacctgcacgttctgtctgatgcgctgctca

SEQ ID NO: 1583 - DNA, 170 bp, Homo sapiens
ttcctgctccgtgggaaccacgagtgtgccagcatcaaccgcatctatggtttctacgatgagtgcaagagacgctacaacatcaaactgtggaaaaccttcactgactgcttcaactgcctgcccatcgcggccatagtggacgaaaagatcttctgctgccacggagg

SEQ ID NO: 1584 - DNA, 368 bp, Homo sapiens
ccagacgtggtggctcacacctgcagtcccagcaccttaggaggccgaggcaggaggatccttgaggtcaggagttcgagaccagcctcgccaacatggtgaaaccccatttctactaaaaatacaaaaaattagccaagtgtggtggcatatgcctgtaatcccaactactcagaaggccgaggcaggagaattacttgaacgcaggagaatcactgcagcccaggaggcagaggttgcagtgagccgagattgcaccactgcactccagcctgggtgacagagcaagactccatctcagtaaataaataaataaataaaaagcgctgcagtagctgtggcctcaccctgaagtcagcgggcccagg

SEQ ID NO: 1585 - DNA, 392 bp, Homo sapiens
caaccctctctcctcagcgcttcttctttcttggtttgatcctgactgctgtcatggcgtgccctctggagaaggccctggatgtgatggtgtccaccttccacaagtactcgggcaaagagggtgacaagttcaagctcaacaagtcagaactaaaggagctgctgacccgggagctgcccagcttcttggggaaaaggacagatgaagctgctttccagaagctgatgagcaacttggacagcaacagggacaacgaggtggacttctaagagtactgtgtcttcctgtcctgcatcgccatgatgtgtaacgaattctttgaaggcttcccagataagcagcccaggaagaaatgaaaactcctctgatgtggttggggggtctgccag

SEQ ID NO: 1586 - DNA, 158 bp, Homo sapiens
cctccactgccagcctatggttgttcgccaccaagccaggagtgctgcaccgcccagtggtccccctcgggctccaggcccccactgagaccctctcggaggcagaagcacttcacccctcagagtcctacaagtccaaccagtggacctggaattgg

SEQ ID NO: 1587 - DNA, 85 bp, Homo sapiens
ccaatgtacatggtggactatgccggcctgaacgtgcagctcccgggacctcttaattactagacctcagtactgaatcaggacc

SEQ ID NO: 1588 - DNA, 369 bp, Homo sapiens
  misc_feature 363: n = A,T,C or G
ccaggctaccttcccactggagacaggcagggggacaggtgctaagggacctggcaggcagggctggcaggccccatggcgcctgttccagcagatgacaagcccaggtcagggtagagcgggcaggaggggggacgagggctcccacaacatgattttgtgtaaaatatggcagcgacacacgctcagggccgggaggtgggggttagggtggggacggcggcaacatcgtgtaaaaaagtgtcccagttcccatagcaaagagagctgtgaccgggtgttcagagcttctccagtacaagggggaaagccgcccggcgggggcggcgggcagggacatcatttggtttcctggtgctgtcngtccga

SEQ ID NO: 1589 - DNA, 361 bp, Homo sapiens
ctgtagcttctgtgggacttccactgctcaggcgtcaggctcagatagctgctggccgcgtacttgttgttgctttgtttggagggtgtggtggtctccactcccgccttgacggggctgctatctgccttccaggccactgtcacggctcccgggtagaagtcacttatgagacacaccagtgtggccttgttggcttgaagctcctcagaggagggcgggaacagagtgaccgagggggcagccttgggctgacccaggacggtcagcttggtccctccgccgaacagtacaaagggactcaggctgttatcataggactggcagtaataatcagcctcatcttcagcctggagcccag

SEQ ID NO: 1590 - DNA, 434 bp, Homo sapiens
  misc_feature 397: n = A,T,C or G
ctggagaaggtgtgcaggggaaaccctgctgatgtcaccgaggccaggttgtctttctactcgggacactcttcctttgggatgtactgcatggtgttcttggtgctgtatgtgcaggcacgactctgttggaagtgggcacggctgctgcgacccacagtccagttcttcctggtggcctttgccctctacgtgggctacacccgcgtgtctgattacaaacaccactggagcgatgtccttgttggcctcctgcagggggcactggtggctgccctcactgtctgctacatctcagacttcttcaaagcccgacccccacagcactgtctgaaggaggaggagctggaacggaagcccagcctgtcactgacgttgaccctgggcgaggctgacnacaaccactatggatacccgcactcctcctcctgagg

SEQ ID NO: 1591 - DNA, 439 bp, Homo sapiens
  misc_feature 409: n = A,T,C or G
gctttcgccagaaaatgttgcatgtcaaacaatatgtgatccatactgtgtgtcgtccttgggggtttatttgactttgtcacaatgacagccaacagtgagactgataagcctgtaaaaataaaaaaataagactaatcaaatagacatggcattttaatctcaaagtgcaaaatcatctaactgaaaatgacggcattgagaaattccagtggttaaaaatgaatcaaaacttcattacgcaggcagtggaagtgtgttgaaagatttaccaggggtgtcaagttttagacactcagaaaggcaccattctagccatcttgattggataacatgtatatacttatgtccctacgatattcaaaagataatactgttttagtacaaaacaatcaaacaaggcaaagantcaaaaccaagccaacccaaatatccccag

SEQ ID NO: 1592 - DNA, 74 bp, Homo sapiens
  misc_feature 53: n = A,T,C or G
tttttttttctaatgttcacagtccctgctttatttccatttgttcacacacnctttaaaaaaaaaaaaaaaaa

SEQ ID NO: 1593 - DNA, 288 bp, Homo sapiens
ccatccgaagcaagattgcagatggcagtgtgaagagagaagacatattctacacttcaaagctttggtgcaattcccatcgaccagagttggtccgaccagccttggaaaggtcactgaaaaatcttcaattggattatgttgacctctaccttattcattttccagtgtctgtaaagccaggtgaggaagtgatcccaaaagatgaaaatggaaaaatactatttgacacagtggatctctgtgccacgtgggaggccgtggagaagtgtaaagatgcaggattgg

SEQ ID NO: 1594 - DNA, 455 bp, Homo sapiens
ccacacagactcaccaagccacagacttgtcttccacaagcacgttcttaccttagccacgaagtgaccaagccacacgtactaaaggttgaactcaaagatatgtacagggtattaaacaaataccaaggggaacagttaacttcaatacaaggtcaaaatcagcaacaagttctacaatccagtgctgatatcagatacaagcttcaaggacaatttcttttcgaaggcttattccagtttcgtgaggctagcatgaggtgtgtgcatttgccaggggcaaatttctattctcaattaacccatgcagcaaatgctacgcatctgctgagtccgtttagaagcatttgcggtggacgatggaggggcccgactcgtcgtactcctgcttgctaatccacatctgctggaaggtggacagtgaggccaggatggagccaccgatccacaccgag

SEQ ID NO: 1595 - DNA, 367 bp, Homo sapiens
  misc_feature 360: n = A,T,C or G
ccaggctaccttcccactggagacaggcagggggacaggtgctaagggacctggcaggcagggctggcaggccccatggcgcctgttccagcagatgacaagcccaggtcagggtagagcgggcaggaggggggacgagggctcccacaacatgattttgtgtaaaatatggcagcgacacacgctcagggccgggaggtgggggttagggtggggacggcggcaacatcgtgtaaaaaagtgtcccagttcccatagcaaagagagctgtgaccgggtgttcgagcttctccagtacaagggggaaagccgcccggcgggggcggcgggcagggacatcatttggtttcctggtgctgncagtccg

SEQ ID NO: 1596 - DNA, 193 bp, Homo sapiens
ctgttcttcatgcgcctggtggggaagacgcccattgagacactgatcagagacatgctgctgtcggggagtaccttcaactggccctacggctcgggccagtgaccatgacggggccacgtgtgctgtggccaggcctgcagacagacctcaagggacagggaatgctgaggccccgggaggcccctcgagg

SEQ ID NO: 1597 - DNA, 145 bp, Homo sapiens
ccatgctggatgttctgctgcttagacctgatctgctgccaattaccaggggcaggtcaaggatgaccttcttggatccaggaacgctaacatagatcagtaaggaatattcaactcgaaggatgttgcagcccaggatagaagg

SEQ ID NO: 1598 - DNA, 445 bp, Homo sapiens
ctgcctataaaactagacttctgacgctgggctccagcttcattctcacaggtcatcatcctcatccgggagagcagttgtctgagcaacctctaagtcgtgctcatactgtgctgccaaagctgggtccatgacaacttctggtggggcgagagcaggcatggcaacaaatcccaagttagggtctccaatgagcttcctagcaagccagaggaagggcttttcaaagttgtagttacttttggcagaaatgtcgtagtactgaagattcttctttcggtggaagacaatggatttcgccttcactttcctgtccttaatatccactttgttgccacacaacacaatggggatgttttcacacactcgtaccagatctctatgccagttaggcacattcttgtaagtaactctcgatgttacatcaaacattatgatggcacac

SEQ ID NO: 1599 - DNA, 142 bp, Homo sapiens
cctgccccagggggaagcacggacccgagacgacggcgatgaggaagggctcctgacacacagcgaggaagagctggaacacagccaggacacagacgcggatgatggggccttgcagtaagcagcctgacaggagcaatgg

SEQ ID NO: 1600 - DNA, 297 bp, Homo sapiens; identical to SEQ ID NO: 389

SEQ ID NO: 1601 - DNA, 289 bp, Homo sapiens
ctggagatgatcctcaacaagccagggctcaagtacaagcctgtctgcaaccaggtggaatgtcatccttacttcaaccagagaaaactgctggatttctgcaagtcaaaagacattgttctggttgcctatagtgctctgggatcccaccgagaagaaccatgggtggacccgaactccccggtgctcttggaggacccagtcctttgtgcctcggcaaaaaagcacaagcgaaccccagccctgattgccctgcgctaccagctacagcgtggggttgtggtcctgg

SEQ ID NO: 1602 - DNA, 398 bp, Homo sapiens
  misc_feature 274, 312, 329, 332, 368: n = A,T,C or G
gggagggcagagggagaatgggaagatcaggaagctctagattacttcagtgataaagagtctggaaaacaaaagtttaatgattcagaaggggatgacacagaggagacagaggattatagacagttcaggaagtcagtcctcgcagatcagggtaaaagttttgctactgcatctcaccggaatactgagaaggaaggactcaagtacaagtccaaagtttcactgaaaggcaatagagaaagtgatggatttagagaagaaaaaaattatnaacttaaagagactggatatgtagtggaaaggcctagnactacaaaagataagcncanagaagaagacaaaaattctgaaagaataacagtaangaaagaaactcagtcacctgagcaggtaaa

SEQ ID NO: 1603 - DNA, 438 bp, Homo sapiens
ctggtgatctgctttcttaccctaactcttgacaaatgagtcgtctactattttaaagagtctggaggtctctgactctgccataacaataacctgctgttaatttataacacagatttttgtttggaagagccttatttgaaatacactttgattcattttcttaaatatttatattcttttcttgcttacttcagggttggtagcttagttggaagtgccagcacctggcacctattcatatagaacaggctgtactcaagacaacttctagcatttactttaagacttatataatttatttctattttgtgtgtactatagtcttgtgcatatgtagttgaacacacagtgaaatatatgtctctctttgtggatgtgcggcctaaaaatttgaatgtctggtgagagagagccatgtgtataggtcagagaaaa

SEQ ID NO: 1604 - DNA, 297 bp, Homo sapiens; identical to SEQ ID NO: 389

SEQ ID NO: 1605 - DNA, 451 bp, Homo sapiens
ggaaaggctattgtttctcgacagtttgtggaaatgacccgaactcggattgagggcttattagcagcttttccaaagctcatgaacactggaaaacaacatacgtttgttgaaacagagagtgtaagatatgtctaccagcctatggagaaactgtatatggtactgatcactaccaaaaacagcaacattttagaagatttggagaccctaaggctcttctcaagagtgatccctgaatattgccgagccttagaagagaatgaaatatctgagcactgttttgatttgatttttgcttttgatgaaattgtcgcactgggataccgggagaatgttaacttggcacagatcagaaccttcacagaaatggattctcatgaggagaaggtgttcagagccgtcagagagactcaagaacgtgaagctaaggctgagatgcgtcgtaaag

SEQ ID NO: 1606 - DNA, 272 bp, Homo sapiens; identical to SEQ ID NO: 1006

SEQ ID NO: 1607 - DNA, 444 bp, Homo sapiens
ccaggctggtctcaaactcctcacctcaactgatccgcccaccttggcctcccaaagtgctgggattataggtgtgagccaccgtgcccaaagttaagtatttttgatcaagtgttttgtcttttgtgcaaggcatttgtggctctgtcatagcagaggaaaacaaaacatgcctatcaaatgaatcaagtccgacctcttctcatattgagcaactagaggtctaggaacatttcccctacctgtcattctcatctggcataccaggtgtacatactccttcttattctcctctgttaccaagatgttggccccattgggtttgaggtcacgaacttcacaaactccaaactcttggacctcagtgctgaaggtgaggtcatagcctagtgtggagacatcattttccagcagataaaccagaccttggtagaagtggtaatc

SEQ ID NO: 1608 - DNA, 189 bp, Homo sapiens
caaaatccaaaacttctcttgaaaagttcagggaccgtccaggggagatggggaggagatatggagtgagtcacctgctccagaagatgccagcttctctctccagggtgcttagttggctttgcccacccctcactccccagggagctctggggacagcttcctcgcacccctgtcccacccacacag

SEQ ID NO: 1609 - DNA, 426 bp, Homo sapiens
cttttgttatccttagaggactcactggtttcttttcataagcaaaaagtacctcttcttaaagtgcactttgcagacgtttcactccttttccaataagcttgagttaggagcttttaccttgtagcagagcagtattaacacctagttggttcacctggaaaacagagaggctgaccgtggggctcaccatgcggatgcgggtcacacggaatgctggagagatgttatgtaatatgctgaggtggcgacctcagtggagaaatgtaaagactgaattgaattttaagctaatgtgaaatcagagaatgttgtaataagtaaatgccttaagagtatttaaaatatgcttccacatttcaaaatataaaatgtaacatgacaagagattttgcgtttgacattgtgtctgggaaggaagggcca

SEQ ID NO: 1610 - DNA, 447 bp, Homo sapiens
cagggctatagtgcgctatgttgatctggtgttcatgctaagttccgcatcaatatggtgacttcttgggagtgggggaccaccaggttgcctaaggaggggtgaacctgcctacgttggaaatagagctggtcaaaactcctgtgctcatcagtagtagaattgcacctgtgaatagccaccgccctccagcatgggcaacatagcaagaccctgcctcttaagataaaaattggaaaacactggtaggaaaaaaaggctgtttggtctaaataagtctggattgggtataaatgacacaaaactatcatgaatttgaaagcatttctaatttcttgaaagtctgaaaaagtttaaacagaattttagctgaaaagtcctgaaagacatttgaaaaaaaacagcaagaacacttaaaactattcaaggtttgggctgggcacagtg

SEQ ID NO: 1611 - DNA, 238 bp, Homo sapiens
ccaccggggttgacctctctcgctagcagggcccacccagctcactccccgcgtcttccatcccctctaggattcccattgtcccctactccagcactaggcaggcacccccagcccactgcgactcccaccacgaaggaccccagccctctctcagccaacacggccccgcccaccgtctcagacatcgtgcttcttctggtgggccaggagtctctcctcgtcgtcgaaggtctgg

SEQ ID NO: 1612 - DNA, 293 bp, Homo sapiens
ctgctgcttgtatcctcgggagagggtttcccactctgagcgggtgggaaggcaatgccaaacatccgggaaaaataaaaccactgtctccacatgagctggaactgtacgccccttgtgggtctcctcagggcgatggtagcgaatctctgcaaaacggtaccattgtgtgcacacacttagatcaatgcctgtcagagccttacaacaacgaatagcagtcttaatcaacacagagggatctttttctgggtctggtccatccaacgaaggagaccagtggcccccaatgg

SEQ ID NO: 1613 - DNA, 224 bp, Homo sapiens
ctggattgaccccaaccaaggctgcaacctggatgccatcaaagtcttctgcaacatggagactggtgagacctgcgtgtaccccactcagcccagtgtggcccagaagaactggtacatcagcaagaaccccaaggacaagaggcatgtctggttcggcgagagcatgaccgatggattccagttcgagtatggcggccagggctccgactctgccgatgtgg

SEQ ID NO: 1614 - DNA, 439 bp, Homo sapiens
ctccaccctggcgatggctccctggtcctactttctctctcaaactggctttttctcattcctttgactccgccagacttcctcgcccccatgacctggtgttgtgtctgatcaccccaacattcctggctgcccaatgtggggcaatgaagaccccagtgaaggaatgctagagtgtgtgaaagtggaggacgcatcgtcaaaggacacctgaggacgtctcaaagaagctcggcgggagagctgagcgctcggaagaaccaagaatcatctcttttgaaaaatcgattcatcaaatgaatcttcggccaacaactgttcaagaaggattcaaatatcacaggttccaagaagtaaagctttggaggtcacaaaattagcaatagaagctgggttccgccatatagattctgctcatttatacaaataatgaggagca

SEQ ID NO: 1615 - DNA, 237 bp, Homo sapiens
aggcactcctggaagtggttcagtcaggtggcaaaaacattgaacttgctgtcatgaggcgagatcaatccctcaagattttaaatcctgaagaaattgagaagtatgttgctgaaattgaaaaagaaaaagaagaaaacgaaaagaagaaacaaaagaaagcatcatgatgaataaaatgtctttgcttgtaatttttaaattcatatcaatcatggatgagtctcgatgtgtagg

SEQ ID NO: 1616 - DNA, 266 bp, Homo sapiens
ctgggctctagtttcattccatctgtcattctcaggtaacagggacacatgtccaagtgttggcccccgtggcatgattgtagctttgttgataggcattgcatcttttgtgtaatatgcaataatggcatgaccagattcatgatatgctgtgatggttttgtttttgttatcaatttccacacttcttctttcaggccccattagaattttgtctttggaaaactccagctccttcatggtaaccatttcttttccatcaacag

SEQ ID NO: 1617 - DNA, 185 bp, Homo sapiens
  misc_feature 62: n = A,T,C or G
ccatggctaggtttatagatagttgggtggttggtgtaaatgagtgaggcaggagtccgagnaggttagttgtggcaataaaaatgattaaggatactagtataagagatcaggttcgtcctttagtgttgtgtatggttatcatttgttttgaggttagtttgattagtcattgttgggtggtg

SEQ ID NO: 1618 - DNA, 354 bp, Homo sapiens
  misc_feature 201, 214, 225, 230, 232, 241, 245, 249, 278: n = A,T,C or G
ctgttaacagataagtttaacttgcatctgcagtattgcatgttagggataagtgcttatttttaagagctgtggagttcttaaatatcaaccatggcactttctcctgaccccttccctaggggatttcaggattgagaaatttttccatcgagcctttttaaaattgtaggacttgttcctgtgggcttcagtgatggngatagtacacatntcactcagagngcatntntgcatcttntaanatanatttcttaaaagcctctaaagtgatcagntgccttgatgccaactaaggaaatttgtttagcattgaatctctgaaggctctatgaaaggaatagcatgatgtgc

SEQ ID NO: 1619 - DNA, 170 bp, Homo sapiens
  misc_feature 145, 146: n = A,T,C or G
ctgtgctgtggagagaagctgatgttttggtgtattgtcagccatcgtcctgggactcggagactatggcctcgcctccccaccctcctcttggaattacaagccctggggtttgaagctgactttatagctgcaagtgtatctnncttttatctggtgcctcctcaaac

SEQ ID NO: 1620 - DNA, 386 bp, Homo sapiens
cctgttgattgcatactgtagaagatttgatgttcagactggttcttcttacatatactatgtttcgtctacagttggtaaatttttgtttttctttgtattaaatgttgaattgtattgtctggaggaaaagacagaggtctaaaaataaagaaggagtacagtttgggcatggtggttcacccctggagtcctagcactttgggggccaaggcaggcagattgcttgagcccaggagttctagatgagcctgggcaacatagtgagaccccatctctaaaaaaacagttttagggccaggcacagtggctcacacctgtaagcccagcactttgggaggccgaggcaggcagatcataagggcaagagattgagaccatcctgg

SEQ ID NO: 1621 - DNA, 346 bp, Homo sapiens
  misc_feature 267: n = A,T,C or G
ccaattctgcccgttccccgtgggccaacaacactggggttgtatgcgtctggaaccctgtgatagtcttcggcttgccagcctggcccaccacatccactgcctggcccacacggacagacactggcaatggccgcagctcctcatcaaacgtaaccagcattcggggctgcatggcagccaccagcccatacaatacatagtgtgatttgcctagaataatgtttcgaacatccaggaaagagacaagcacagtgagcagtccanccacggccacctggctcataagctgccggtcgctgtggtaggggcagagggtaagggtgcccttccctaaatgtgtcag

SEQ ID NO: 1622 - DNA, 366 bp, Homo sapiens
ggaagtttgtgctctctgcgtggctaagtttttcacctactaggacgggggtggggtggggagaacaggtgtccttctaaaatacagcacaagctacagcctgcgtccagccataacccaggagtaacatcagaaacaggtgagaatgaccactttaactcaccgggcccgtcgcactgaaataagcaagaactctgaaaagaagatggaaagtgaggaagacagtaattgggagaaaagtccagacaatgaagattctggagactctaaggatatccgccttactcttatggaagaagtattgcttctgggactaaaagataaagaggggtacacatctttctggaatgactgcatatcatcagg

SEQ ID NO: 1623 - DNA, 165 bp, Homo sapiens
ctgttgattggctgtgacactgctttgtgtcatcttcttaccatgatcaaaggcgaaggaagggatctcttttgggacattgtgattgttttagcagagagagaaagagatgaaatacacttcggttttctcttaaaagatgcatgtatcatacagtgctttaag

SEQ ID NO: 1624 - DNA, 227 bp, Homo sapiens
ccaatgcccggagcaggccctctttccatcccctgtcggatgagctggtcaactatgtcaacaaacggaataccacgtggcaagccgggcacaacttctacaacgtggacatgagctacttgaagaggctatgtggtaccttcctgggtgggcccaagccaccccagagagttatgtttaccgaggacctgaagctgcctgcaagcttcgatgcacgggaacaatgg

SEQ ID NO: 1625 - DNA, 373 bp, Homo sapiens
ctgtagcttttgtgggacttccactgctcaggcgtcaggctcaggtagctgctggccgcgtacttgttgttgctttgtttggagggtgtggtggtctccactcccgccttgacggggctgctatctgccttccaggccactgtcacggctcccgggtagaagtcacttatgagacacaccagtgtggccttgttggcttgaagctcctcagaggagggtgggaacagagtgaccgagggggcagccttgggctgacctaggacggtcagtttggtccctccgccgaacacccgaagataattagtgctgtctgttgagtaacaatagtagtcaccttcatcttccacctgggccccagtgatggtcaaggtgg

SEQ ID NO: 1626 - DNA, 367 bp, Homo sapiens
ccagacgtggtggctcacacctgcaatcccagcaccttaggaggccgaggcaggaggatccttgaggtcaggagttcgagaccagcctcgccaacatggtgaaaccccatttctactaaaaatacaaaaattagccaagtgtggtggcatatgcctgtaatcccaactactcagaaggccgaggcaggagaattacttgaacgcaggagaatcactgcagccctggaggcagaggttgcagtgagccgagattgcaccactgtactccagcctgggtgacagagcaagactccatctcagtaaataaataaataaataaaaagcgctgcagtagctgtggcctcaccctgaagtcagcgggcccagg

SEQ ID NO: 1627 - DNA, 424 bp, Homo sapiens
ctggataaggacatcaataccttctctatgcgtgtcagggtgtggtacgggtatcactttccggagctggtgaagatcatcaacgacaatgccacatactgccgtcttgcccagtttattggaaaccgaagggaactgaatgaggacaagctggagaagctggaggagctgacaatggatggggccaaggctaaggctattctggatgcctcacggtcctccatgggcatggacatatctgccattgacttgataaacatcgagagcttctccagtcgtgtggtgtctttatctgaataccgccagagcctacacacttacctgcgctccaagatgagccaagtagcccccagcctgtcagccctaattggggaagcggtaggtgcacgtctcatcgcacatgctggcagcctcaccaacctgg

SEQ ID NO: 1628 - DNA, 314 bp, Homo sapiens
tcgactgttatagcttagaaagcaacactactactatgagactataaaacattaaactattttaagaaaaccacgctgtggaaaaatggagccatttttgtcaaaaagtggctcaaagcacaaaactgctcagatgttcaagagtcctaggagtctgggctgcacagtattaaggggtgagaggagaccgacagcctgtttgaatcaggcttgtgagcccagctcatctgacaacttcaaagagcttctctgcctatacattccaccgtttagcataagacaccactttacgctatttacaagtctccttttgg

SEQ ID NO: 1629 - DNA, 393 bp, Homo sapiens
  misc_feature 284: n = A,T,C or G
ctggaccagcaccccattgacgggtacctctcccacaccgagctggctccactgcgtgctcccctcatccccatggagcattgcaccacccgctttttcgagacctgtgacctggacaatgacaagtacatcgccctggatgagtgggccggctgcttcggcatcaagcagaaggatatcgacaaggatcttgtgatctaaatccactccttccacagtaccggattctctctttaaccctccccttcgtgttttcccccaatgtttaaaatgtttggatggtntgttgttctgcctggagacaaaggtgctaacatagatttaagttgaataacattaacggtgctaaaaaatgaaaaattctaacccaagacatgacattcttagctgtaa

SEQ ID NO: 1630 - DNA, 317 bp, Homo sapiens
ctgcaagaatatcagaaatcaatacaaacaagtattgacaggtgttacagacatgcaaaatatccttcaatgcaacgaatttttaagaaatcagctagcctatattaatcagatgttttaggtcaaaccaagtttccatctcgggctcagtgaaatagtattaactcattgagtctcctttcccccaggaatgttgggaatggcagaacagaaagagctatcactccttaaattcttttatgcgagtgttactccaacacttattttacttggtttacttggaatgtatgagaggaaactgatgttttttacaatgg

SEQ ID NO: 1631 - DNA, 262 bp, Homo sapiens
ccttaggcaagtcaccttacttatctaagactgtttccccacctggaagatgccctacaagcctcctgtggctgtgtttagaaagcatgcccggcctttcttgacagccagccaccccagatgatggcagggcaaggaagactgttaggagtcagagtgctcccctcaggtggaaggaaactgggccaactctactttgtaagccatagggtgccaggtagcccggccaccctgagcctgtgcctccactgcccccgcgtgg

SEQ ID NO: 1632 - DNA, 138 bp, Homo sapiens
ctggaattaattcttcgacaactccagaccgaccttcggaaggaaaaacaagacaaggccgttctccaagcagaagtgcagcacctgagacaggacaacatgagactgcaggaggagtcccagaccgcgacagctcag

SEQ ID NO: 1633 - DNA, 192 bp, Homo sapiens
  misc_feature 17, 55, 80, 81, 94, 95, 106, 107: n = A,T,C or G
ccttgaagggacctcanagcaaaggaagagacctgggtgtggtgaggcatcccanggcatggaagggaccggttgtgctnngggaatccactgnnccctccttggnnaaaaaagcacaacacatcatacatatttaccagaccagaagcgctggccccaagtctccccaacctggtcgggggaacctcctgg

SEQ ID NO: 1634 - DNA, 447 bp, Homo sapiens
ctgcttttaaaggtcttaaatcactcgaataccttgacttgagcttcaatcagatagccagactgccttctggtctccctgtctctcttctaactctctacttagacaacaataagatcagcaacatccctgatgagtatttcaagcgttttaatgcattgcagtatctgcgtttatctcacaacgaactggctgatagtggaatacctggaaattctttcaatgtgtcatccctggttgagctggatctgtcctataacaagcttaaaaacataccaactgtcaatgaaaaccttgaaaactattacctggaggtcaatcaacttgagaagtttgacataaagagcttctgcaagatcctggggccattatcctactccaagatcaagcatttgcgtttggatggcaatcgcatctcagaaaccagtcttccaccggatatgtatg

SEQ ID NO: 1635 - DNA, 364 bp, Homo sapiens
gttttatttgagacataaaaacacatgtgtttctattacatagtgtggggtttagggtcctggtttctaagacaagactttatttcaccctgtatcacagcttcctgggaaatgaattagggagcaagagacggcctggcaagaaaatcattattgttgctgggaagttgcaaagaaaggggagagtttattcaaattagtgtaacagagcccccaggatgaagagagtggtgcagggaaaaggtctaaattcctggtgttggtggggacactggcacatcccacagcaaggactcagccctcaacggcggcggctgggtcttgggaggggagtggtgggagggtaagggctcctcagctccct

SEQ ID NO: 1636 - DNA, 399 bp, Homo sapiens
ctggctggctagactgtttgtgcgccaagaggatggtcagcgctgctttccagcctggctctgctggggcgctggcatctggttcagttccaccattctccctgctttctttgccaagtgtgatattcacccaagggcaccagtctctatgctgagaggtgggatcaaagaagcttcgggaagatgtgtccgaactgctggaggagcagaggcgagctcgcttggctttccgcagagggctagatggtacctccaggccaggggtgtctcctgttcccatgcttcgggtcactgggcgagttctggtggtggggctagcagcctctggctcaggacggtcaacaggactggaagagtcccagctccgagttcgagagacaatgggaccagggctctttt

SEQ ID NO: 1637 - DNA, 246 bp, Homo sapiens
ctgagctttcagcagataaatcacagcagaaatagaatcaccctaggactttcaatcaaaagctggaagtccaccttacagaaagacaaaaagaaacccctttttatatcttaacaaagcaatagctctcaagcagcagagcatctcgaggaagaaagcttgcccggtcgccatcccatcatgccagagcgtgcagtgtccacccttgactacgctggggaattgctgattttttgaaaaagcttg

SEQ ID NO: 1638 - DNA, 453 bp, Homo sapiens
ccaagagttctccactgtgaagactgaaaggacctggtgacatttcggcatcagtcctgttaccacttggaggtaacagaagcaggctcgtgtcctcctttaattctaccacactacatgactcgcaattggttctgaaattagaacgttcaccatcgtacttaaaatcttaggggcatgaagagtcagctagaacaaggaaaaagaaagtcgcaggtagtaggtaagtaggtgggcacatgaaaagccaagctgctctgtccaacaccagtgtacatgtgctttaactaaatgaactccagaggccaacagcagcagacctgctcaattcaccttccaaatcagaacaagaccaaaaagctcaggcttgagttgtcaactatgcataggttccgccagtgatgaggagctcgtaagcaggatctctactccttctgcacaacacgatgcaag

SEQ ID NO: 1639 - DNA, 197 bp, Homo sapiens
tttgctgttcgtgatatgagacagacagttgcggtgggtgtcatcaaagcagtggacaagaaggctgctggagctggcaaggtcaccaagtctgcccagaaagctcagaaggctaaatgaatattatccctaatacctgccaccccactcttaatcagtggtggaagaacggtctcagaactgtttgtttcaattgg

SEQ ID NO: 1640 - DNA, 278 bp, Homo sapiens
ccagagcggtgagtcccaccacctcgaactctgggaattcgagccacagctctgccagtaccccaagactcagcactagtctgatgacctgctaattcactgacagcatagggctgtctgttgtttttgcgcaagttggtgtgaacaaagttcacaatatctggtcgaataggagccttgaatacagcaggcaaagtgacatttttgccagatgactcccccttttcggagtacaccgatatcagtgggcgagcgcacgccatggcggacctcggccg

SEQ ID NO: 1641 - DNA, 227 bp, Homo sapiens
ccattgttcccgtgcatcgaagcttgcaggcagcttcaggtcctcggtaaacataactctctggggtggcttgggcccacccaggaaggtaccacatagcctcttcaagtagctcatgtccacgttgtagaagttgtgcccggcttgccacgtggtattccgtttgttgacatagttgaccagctcatccgacaggggatggaaagagggcctgctccgggcattgg

SEQ ID NO: 1642 - DNA, 299 bp, Homo sapiens
ctgcacatcaaggacatcttcaggaagttcaggattgccgtagctaaactgaaaaccaccatccatggactctccaaaccaaacgtgtttcttctcagcactagaatctgtccaccagtgtttccgtggaacattcaaaggattggcacttatgcatgtttccccagtttccatattacagaataccttgatagcatccaatttgcatccttggttagggtcaacccagtattctccactcttgagttcaggatggcagaatttcaggtctctgcagtttctagcggggtttttacgag

SEQ ID NO: 1643 - DNA, 301 bp, Homo sapiens
ccaagggctacaatgagcagcgcatcagacagaacgtgcaggtttttgagttccagttgactgcagaggacatgaaagccatagatggcctagacagaaatctccactattttaacagtgatagttttgctagccaccctaattatccatattcagatgaatattaacatggagagctttgcctgatgtctaccagaagccctgtgtgtggatggtgacgcagaggacgtctctatgccggtgactggacatatcacctctacttaaatccgtcctgtttagcgacttcagtcaactacag

SEQ ID NO: 1644 - DNA, 365 bp, Homo sapiens
ctggtgagcgaaggatgggagcagagaacagagctaaaacccctggttttcctttccccagatgtaaagcctgctagctggaactcacagaagattggaacaaaaagataggagatggacacctgggggactgctccagcacgaagggaagcgatgagcatcacacagcagggccattgcaggggacaggtgctgtaattcctgcccagagaacttgaaagcttacagtgtgctcacaggaaggaatcggctcagctagtccagaaattgctgcatttcccatattacttagttctttattcatcctgtggtaaagagtcacccttgttttccgtatctataaaactgaaagacttaaaatttac

SEQ ID NO: 1645 - DNA, 249 bp, Homo sapiens
ctggtgctggaactgcagaaagttaagcaggagaacatccagctagcggcagacgcccggtctgctcgtgcctatcgagacgagctggattccctgcgggagaaggcgaaccgcgtggagaggctggagctggagctgacccgctgcaaggagaagctgcacgacgtggacttctacaaggcccgcatggaggagctgagagaagataatatcattttaattgaaaccaaggccatgctggaggaacag

SEQ ID NO: 1646 - DNA, 433 bp, Homo sapiens
  misc_feature 398: n = A,T,C or G
ctgtggccggattgatggggcccccacttcctagggctgaaggcaagttgaaggaagcagcaggagtaccggaatgaaaaccttgtttctcaaaggactgctgggttttggagtacacagaacccgagatatctggcacgcccgtgttactggaggtgactgaaacaccagtgttgtatccatgagacccatatccactcggctgttggaaaggggtggccgatgcattcacactgacattcacaccatgctgcttggaagaggtaggagccacagggaacacagcaggcccatactggaaggtgctggggaggcccgggacccctgtatagtatggcaggctggtgtaaactgtagccaggaggcagcgccgggttcaggaatgtctgctgcgtggnatggtgagtctgcgtctggtttctgttggggttgg

SEQ ID NO: 1647 - DNA, 451 bp, Homo sapiens
ccagcttgcaagcacgctggcaaatctctgtcaggtcagctccagagaagccattagtcattttagccaggaactccaagtccacatccttggcaactggggacttgcgcaggttagccttgaggatggcaacacgggacttctcatcaggaagtgggatgtagatgagctgatcaagacggccaggtctgaggatggcaggatcaatgatgtcaggccggttggtagcgccaatgatgaacacatttttttttgtggacatgccatccatttctgtcaggatctggttgatgactcggtcagcagccccaccaccatctccaatgttacctccacgagccttggcaatcgaatccagctcatcaaagaatagcacacagggggcagcttggcgggccttgtcaaagatttctctgacattggcctcagactccccaaaccacatggtgag

SEQ ID NO: 1648 - DNA, 176 bp, Homo sapiens
cctaaacgaggatttcagcttccattatgcccaactccagtccaacatcattgaggcgattaatgagctgctagtggagctggaagggacaatggagaacattgcagcccaggctctggagcacattcactccaatgaggtgatcatgaccattggcttctcccgaacagtagagg

SEQ ID NO: 1649 - DNA, 435 bp, Homo sapiens
tgtggctgtgccgttggtcctgtgcggtcacttagccaagatgcctgaggaaacccagacccaagaccaaccgatggaggaggaggaggttgagacgttcgcctttcaggcagaaattgcccagttgatgtcattgatcatcaatactttctactcgaacaaagagatctttctgagagagctcatttcaaattcatcagatgcattggacaaaatccggtatgaaagcttgacagaccccagtaaattagactctgggaaagagctgcatattaaccttataccgaacaaacaagatcgaactctcactattgtggatactggaattggaatgaccaaggctgacttgatcaataaccttggtactatcgccaagtctgggaccaaagcgttcatggaagctttgcaggctggtgcagatatctctatgattgg

SEQ ID NO: 1650 - DNA, 246 bp, Homo sapiens
ccatgtctgtattgtaactggtaaaaggcttcaagtcagattgatgatcaagaaaagtcaaaaccccagcccaagattgggaaagcaggtggtggttccaagcttttaaaaaattattgaagctctccatcctgttctgtgagtgtgtcttctctttctccttcacgtcatagccgtgacccaccgttcatctctgctcttgcgtaaagatgaccgatggagtccaaagccaagtggcttcaccag

SEQ ID NO: 1651 - DNA, 400 bp, Homo sapiens
  misc_feature 171, 172, 303, 344, 354, 357, 366, 367, 379, 391: n = A,T,C or G
cggcaagttctcccaggagaaagccatgttcagttcgagcgccaagaccgtgaagcccaatggcgagaagccggacgagttcgagtccggcatctcccaggctcttctggagctggagatgaactcggacctcaaggctcagctcagggagctgaatattacggcagctanngaaattgaagttggtggtggtcggaaagctatcataatctttgttcccgttcctcaactgaaatctttccagaaaatccaagtccggctagtacgcgaattggagaaaaagttcagtgggaagcatgtcgnctttatcggctcagaggaggaattctgcctaagccaactcnaaaaagccgnacnaaaaattanngcaaaaagcgtnccaggagccgtnctctgacag

SEQ ID NO: 1652 - DNA, 338 bp, Homo sapiens
ctgggggtgcccatcttctgtgctctgtggtacatatctgtgtcgccaaagtagcgtgcccggtacagcaagccttccttctgctgcttctccttccagcagttgttccggaggttggcgatataatcatcttccacattccgctcgactgttttgaggctggagcctgtgtactcttcggagaaagtgtctcccacatagtagacgacacccaggtggtcagtgactcgcctgtggatgtggcccacagacggtcttggactcagactgtagggtggactggagaccatgagctggctgagagctgacacgagaatcaggatgaggataggcatcag

SEQ ID NO: 1653 - DNA, 167 bp, Homo sapiens
gcggtggagccgccaccaaaatgcagattttcgtggaaacccttacggggaagaccatcaccctcgaggttgaaccctcggatacgatagaaaatgtaaaggccaagatccaggataaggaaggaattcctcctgatcggcagagactgatctttgctggcaagcag

SEQ ID NO: 1654 - DNA, 1034 bp, Homo sapiens
  misc_feature 88, 827, 882, 897, 905, 933, 945, 950, 955, 973, 976, 991,999, 1010, 1022, 1023, 1024, 1033: n = A,T,C or G
atgcatgctcgagcggccgccagtgtgatggatatctgcagaattcgcccttagcgtggtcgcggccgaggtccaagagggagataanacaaacttctcaaacaaaaagaaaagaaaaacgaatgattcatctgctttaatcagtgtgattaatgcagcacccattgccccgggaaccgtttctgctgtactatctggatactaaaatgttacggaagtagctctttgttctccctcactctgcccttagttaatagaaattcagactcgccaagtaaggctttgtgcatagtgtcttcatgtcgcgtatagttgagcgcgttcttagcagttggcttcatggacagctcattagtgttttgacttttcttacccagcgttaattgaattcttgcttttagacaacttcctttttgtagtggtgaaccttgccctttagtacagttcaagtgaatctggataattgttcatctttgctttagcttagataccatgtagtggtctgtggctacaggaagctggttctgtctgcttccacagtctgcttaaaaaactgtctgacttcgtgaatatagagaccaagtttaccacttctgatgaagagaccaattaagattcattcctcattctgtttctttccagtgggagaagagtccccatgaaataagatgaaactgattccatgcactagtacatgtaggcttctcccttgcgcaaagcttaacaatttgtaggaaactttgggtctttttgtcccaagaaaaaggaatgtcttgacaggcttaaagcttttcgtccccttgcaccttaaaactcgaaagttaggnaaaatccctttaaagggctttttttaatagccagaacttcccaaaaggaatggcnttttagggaatttcntagccatngctttttaaatttaaagaaatttttaanaaccttgccccnggggnggggncccgctccaaaaaggggnggnaaaattccccagccnaccctttnggggggggccncgttttcctttnnnggggggaanc

SEQ ID NO: 1655 - DNA, 487 bp, Homo sapiens
atgcatgctcgagcggccgccagtgtgatggatatctgcagaattcgccctttcgagcggccgcccgggcaggtcctactcttctccgtccattgtactatctgcccgtggtggggatggcagtaggatcatatttgatgacttccgagaagcatattattggctccgtcataatactccagaggatgcgaaggtcatgtcctggtgggattatggctatcagattacagctatggcaaaccgaacaattttagtggacaataacacatggaataatacccatatttctcgagtagggcaggcaatggcgtccacagaggaaaaagcctatgagatcatgagggagctcgatgtcagctatgtgctggtcatttttggaggacctcggccgcgaccacgctaagggcgaattccagcacactggcggccgttactagtggatccgagctcggtaccaagcttggcgtaatcatggtcatagctgttt

SEQ ID NO: 1656 - DNA, 514 bp, Homo sapiens
  misc_feature 55: n = A,T,C or G
atgcatgctcgagcggcccgccagtgtgatggatatctgcagaattcgcccttancgtggtcgcggccgaggtcctacccataatccagagaggcttgcccagaggaggactacgtgggggacgtgccaccagaaccctacttgggggcgggatgtcactccgaggtcaaaacctgctccgaggtggacgagccgtagctccccgaatgggcttaagaagaggtggtgttcgaggtcgtggaggtcctgggagagggggcctagggcgtggagctatgggtcgtggcggaatcggtggtagaggtcggggtatgataggtcggggaagagggggctttggaggccgaggccgaggccgtggacgagggagaggtgcccttgctcgccctgtattgaccaaggagcagacctgcccgggcggccgctcgaagggcgaattccagcacactggcggccgttactagtggatccgagctcggtaccaagcttggcgtaatcatggtcatagctgttt

SEQ ID NO: 1657 - DNA, 605 bp, Homo sapiens
  misc_feature 78, 91: n = A,T,C or G
atgcatgctcgagcggccgccagtgtgatggatatctgcagaattcgccctttcgagcggccgcccgggcaggtccanacgctgacattgnttctgagtccttaagcaggaaggatttgaaatcctggagcttggcagtcttgctcttcacctctaagccaatgttgaccccttcatctataaagtccacaactctccggaagtcatcctcacggaactgtcgagaagttaaggctggggccccaagccgcaggccgcccggtgtgatggcacttcggtctccaggacaggtgttcttgttggcagtgatggatacaagctctagcacccgctcagcccgagctccatccaggcccttgggccgcaggtccaccagcaccaggtggttgtcagtaccacctgataccagtgagtagcctcgccctagcagggcatctgccatggcccgagcattcttcagaacctgcagggagtactcccggaacatgggggtgcaggacctcggccgcgaccacgctaagggcgaattccagcacactggcggccgttactagtggatccgagctcggtaccaagcttggcgtaatcatggtcatagctgtttc

SEQ ID NO: 1658 - DNA, 784 bp, Homo sapiens
  misc_feature 3, 4, 10, 19, 22, 53, 76, 85, 87, 149, 184, 713, 747: n = A,T,C or G
agnnttccgncggccctcnagntgcatgctcgagcggccgcgcagtgagatgnatatctgcagaattcgcccttancgtgggcgnangcatgacgctcgggatcagaactaaaacaagtgagatcacccctctaattatttctgaactnggttaataaaagcttataagatttttatgaagcanccactgtatgatattttaagcaaatatgttatttaaaatattgatccttcccttggaccaccttcatgttagttgggtattataaataagagatacaaccatgaatatattatgtttatacaaaatcaatctgaacacaattcataaagatttctcttttataccttcctcactggccccctccacctgcccatagtcaccaaattctgttttaaatcaatgacctaagatcaacaatgaagtattttataaatgtatttatgctgctagactgtgggtcaaatgtttccattttcaaattatttagaattcttatgagtttaaaatttgtaaatttctaaatccaatcatgtaaaatgaaactgttgctccattggagtagtctcccacctaaatatcaagatggctatatgctaaaaagagaaaatatggtcaagtctaaaatggctaattgtcctatgatgctattatcatagactaaccgacatttatcttcaaaacaccaaattgtctttagaaaaaattaatngtgattaccaggtagaaggacctgcccgggcggnccgctcgaaagggccgaaattccagccccacctgggc

SEQ ID NO: 1659 - DNA, 789 bp, Homo sapiens
  misc_feature 2, 4, 19: n = A,T,C or G
tngngccctctagatgcangctcgagcggccgccagtgtgatggatatctgcagaattcgcccttagcgtggtcgcggccgaggtccattaaagataagtttggctaactattttactgaagagactaatggtcttccctctgttgtactgctatgtttcttgatctgtttttccccaatgtaacagtctacattgaagtcctttagctctctccatatactaattgacatttgttaaggattcaatattttgtgaattctttttacccttaaaatgcatatctttcagagagataagaatgaattttgcaataatttatatgcagagtgtgcttatgggtttctgggagttcaagttagtaccccagagtgcttaaaagtacgatgctaaattctaaggctaatgtaatgactgtagattatctatgtccacattgttcaacagaaatataatgtgaaccacaacataatttttaattttctagtagccatattaaaaaagaaacaagcaaaattaattttaataacagtttatgtaacccagtatattaaaaatatcatttcaacatgtaatcaatataaaagattattaatgaaacaccttatcctctttttcttccatgctaagtcttagatttgagtgtattttgcactcacagcacatctcaattctgactggacctgcccgggcggccgctcgaaagggcgaattccagcacactgggcggccgttactagtggatccgagctccggtaccaagcttggcgtaatcatggtcatagctgttt

SEQ ID NO: 1660 - DNA, 559 bp, Homo sapiens
  misc_feature 3, 53, 313, 323, 330, 368, 411, 452, 457, 460, 463, 470,487, 499, 516, 518, 545: n = A,T,C or G
ccncgccctctagatgcatgctcgagcggccgccagtgtgatggatatctgcngaattcgccctttccagcggccgcccgggcaggtccatcagacttcttgggtgcctggctatattcaatgtgaagtaaaaaatatcccaagtcttacaccaaaatagaggctctgacttagaagtatgcttttagctttctttttaaataagacattctggaagaaaaaaaaagaaaaaggaaagaaaatcaagtttgaaacacagttaacacttattttggcaagaaagcaaccaaaatctaaaaagcataaactatgngtccaaatgnaaaaggnattacagaacaaactgcaagaggggaaaattaaagccncactgaacgaaaaaatacagtatgtctaacattttggaattgnaatttaaaccctaagggcaaaagctgaaaaatcatgcttanacctnggncgngaccacnctaagggcgaattccancacactggcggncgttactagtggatccnanctcggtaccaagcttggcgtaatcctnggcatagctgtttc

SEQ ID NO: 1661 - DNA, 453 bp, Homo sapiens
ttgggccctctagatgcatgctcgagcggccgccagtgtgatggatatctgcagaattcgccctttcgagcggccgcccgggcaggtctgcagtgtccctttttatatcatgctagtgttgagacatacttgactaacttgggaacagttcgatatattgacaaccgtcaacttaagaaaatcaacagcttttggccccagcgtccaagtgaacttttcatggagtgcagaatctcaaatggacaaaatactttgtctttttaaatactgaaaatttaattattagtactatgactgaaagattcttcatggctaaaaagctctgcatcaaactcaattcaggaggacctcggccgcgaccacgctaagggcgaattccagcacactggcggccgttactagtggatccgagctcggtaccaagcttggcgtaatcatggtcatagctgtttc

SEQ ID NO: 1662 - DNA, 809 bp, Homo sapiens
  misc_feature 16, 25, 47, 98, 301, 437, 446, 461, 464, 491, 500, 524, 526,530, 564, 589, 599, 603, 617, 633, 657, 658, 676, 682, 689,696, 709, 726, 738, 742, 751, 753, 755, 762, 773, 776, 779,784, 789, 792, 802, 805: n = A,T,C or G
ctcgagcggccgccantgtgatggntatctgcagaattcgcccttancggccgcccgggcaggtccttagccaaagaatgcagtggagccttcccccnggggctgcattgtgaatgaataccaattgacagcataaaaattaatagtcccatatcagatctggaaggggtttctggggctgtctgatgtccctatcctgttgtagtgaacacaatagcagaaaattctttctgggtccatctgctataaagtcttggtaaaacagcattactatgaagaggatgaactcacctaccttcanatggaggaaaagtgaaaaggacttaggctttagtcctccatgacttttcttaagcactacctacctgtaataagctgagtgcaaaaggatgccgaagaaaatctgcacccagaagctgttagaaagcactgcagangaacagggnatgaataaaataaanagntcttaataaacccttaagattctttgntcaaggggnactttgccaaaaggggcagaatangngggnaaagagttgcttttaatctagctctacactggcntttgaaaataaaatttgcccatttngaaatatatngggntataattaaaatgnggctttttacactggnggggctatataaaaactgggtagnnaaatttccaccgagcatntatggngatttgntcacagnaaacctccgggcnggacccacgctaagggnggaattccagcnacantgggggggncngntacctanagtggatcccnagnctnggggnccccnaanctttgggggngtnaatc

SEQ ID NO: 1663 - DNA, 585 bp, Homo sapiens
ttgggccctctagatgcatgctcgagcggccgccagtgtgatggatatctgcagaattcgcccttgccgcccgggcaggtgatggatgaggagcaaaaactttatacggatgatgaagatgatatctacaaggctaataacattgcctatgaagatgtggtcgggggagaagactggaacccagtagaggagaaaatagagagtcaaacccaggaagaggtgagagacagcaaagagaatatagaaaaaaatgaacaaatcaacgatgagatgaaacgctcagggcagcttggcatccaggaagaagatcttcggaaagagagtaaagaccaactctcagatgatgtctccaaagtaattgcctatttgaaaaggttagtaaatgctgcaggaagtgggaggttacagaatgggcaaaatggggaaagggccaccaggctttttgagaaacctcttgattctcagtctatttatcagacctcggccgcgaccacgctaagggcgaattccagcacactggcggccgttactagtggatccgagctcggtaccaagcttggcgtaatcatggtcatagctgtttcc

SEQ ID NO: 1664 - DNA, 999 bp, Homo sapiens
  misc_feature 2, 5, 10, 22, 83, 150, 176, 189, 264, 275, 283, 286, 302,311, 318, 338, 374, 524, 528, 531, 536, 541, 606, 611, 614,616, 621, 634, 635, 636, 644, 659, 682, 688, 702, 715, 723,726, 768, 777, 779, 789, 796, 802, 810, 819, 831, 836: n = A,T,C or G
  misc_feature 853, 854, 869, 874, 893, 900, 903, 911, 989, 999: n = A,T,C or G
anccngctcnagcggccgccantgtgatggatatctgcagaattcgccctttcgagcgggccgcccgggcaggtctgacaatngattaaacaggcgacatgcaacccccactaaggttaaaagtccaaaactactcacacgcatctcttnattggggaaaagctgagactattatncattcttggtagncttgcaaccttgcatgaagagcacccattgcatttctttcatctttcagaaagcaccggtatctgttccaagggnctaacagtacnaaaatacnttntgggattacacctttnaaacccaanactgttntcattaaaaataattttggnttgtaacaaaattatgaaatacaatgcaagcacctnggtatagcattattactgaaaccacttaattcccagctttttgagttttttaaaaaaacccactgcactaagattcacaattcattgctacatacaaattaaagctagtaagaacacactaacgtcacaagtttctcattctaaagtgcnaaanccntaatngtctngaaagtggaacaggggtaaagggcaaaaattaaccccccccaccccaattaaagtttcctggaangtcantantnttttnaatccccaaaggnnncatttctntttaaaaaaattggntacctttggaactggggtaaagnaaaatnaggaacccctgggnggttttttttatnttttcttnaanccaaccccccaattccaccttaaaaacccccacccggggganggccaaaangnccacccttgnggaaacncttttngtgggggncccggtcgnaaaacccaaccnccctntaaaaagggggggtcgnnaaaaaatttctcccnaaganaaacccacctttggggcgnggggacncgntttacccnttaaaatggggggaattccccgaaagcgtttgggggtaaccccaaaagacctttggggggggaaaaatgaatgggggnccattaaccn

SEQ ID NO: 1665 - DNA, 27 bp, Artificial Sequence
  PCR primer
gctaaaggtgaccccaagaaaccaaag

SEQ ID NO: 1666 - DNA, 37 bp, Artificial Sequence
  PCR primer
ctattaactcgagggagacagataaacagtttcttta

SEQ ID NO: 1667 - protein, 207 aa, Homo sapiens
MQHHHHHHAKGDPKKPKGKMSAYAFFVQTCREEHKKKNPEVPVNFAEFSKKCSERWKTMSGKEKSKFDEMAKADKVRYDREMKDYGPAKGGKKKKDPNAPKRPPSGFFLFCSEFRPKIKSTNPGISIGDVAKKLGEMWNNLNDSEKQPYITKAAKLKEKYEKDVADYKSKGKFDGAKGPAKVARKKVEEEDEEEEEEEEEEEEEEDE

SEQ ID NO: 1668 - DNA, 636 bp, Homo sapiens
catatgcagcatcaccaccatcaccacgctaaaggtgaccccaagaaaccaaagggcaagatgtccgcttatgccttctttgtgcagacatgcagagaagaacataagaagaaaaacccagaggtccctgtcaattttgcggaattttccaagaagtgctctgagaggtggaagacgatgtccgggaaagagaaatctaaatttgatgaaatggcaaaggcagataaagtgcgctatgatcgggaaatgaaggattatggaccagctaagggaggcaagaagaagaaggatcctaatgctcccaaaaggccaccgtctggattcttcctgttctgttcagaattccgccccaagatcaaatccacaaaccccggcatctctattggagacgtggcaaaaaagctgggtgagatgtggaataatttaaatgacagtgaaaagcagccttacatcactaaggcggcaaagctgaaggagaagtatgagaaggatgttgctgactataagtcgaaaggaaagtttgatggtgcaaagggtccagctaaagttgcccggaaaaaggtggaagaggaagatgaagaagaggaggaggaagaagaggaggaggaggaggaggaggatgaataatgactcgag

SEQ ID NO: 1669 - DNA, 2821 bp, Homo sapiens
ccacgcgtccgcgccgcgcggcgcaggggaggcgagaggcgccccccggtggagagcctgagccccgcgcaagtctggcggcacctggcgagcggagccggagtcgggctggggaccgcggggttgaggccggaccgcggcggggtcgggggagaaacgcgcgctgccctggcacgggccccaaccccccggccgcgcggaatggtatggcccggccggagttaaggccggggggaggcggcgagtcccgcggcggcggcgacgatggggctgcgtgcaggaggaacgctgggcagggccggcgcgggtcggggggcgcccgaggggcccgggccgagcggcggcgcgcagggcggcagcatccactcgggccgcatcgccgcggtgcacaacgtgccgctgagcgtgctcatccggccgctgccgtccgtgttggaccccgccaaggtgcagagcctcgtggacacgatccgggaggacccagacagcgtgccccccatcgatgtcctctggatcaaaggggcccagggaggtgactacttctactcctttgggggctgccaccgctacgcggcctaccagcaactgcagcgagagaccatccccgccaagcttgtccagtccactctctcagacctaagggtgtacctgggagcatccacaccagacttgcagtagcagcctccttggcacctgctgccaccttcaagagcccagaagacacacctggcctccagcaggctgggccatgcagaagggatagcaggggtgcattctctttgcacctggcgagagggtctgactctgggcacccctctcaccggctacaaggccttggactcactgtacagtgtgggagccccagttcccacctctgtgacaataggatcatggccttacccttgaagcattaccgagaaggagaacagagatgggcttgaagagccacgtgctgccggctccaaattcccaaggacaaggatccctctgcatttttgtctatgtaacctcttatatggactacattcagctgcaaggaaaggaaaaccttgattgcagtggtttaaacaaacagaagattgtttttccacatagcatggattctggagatgggtggctaatggtattggttcaacaactccacgaaggtaggggtcacgtcttggatccttttgccttaatctcagtgctcgttacttcatggtcccaagatggctgctgtatccccaagaatcatgtctgcgttcaaggaaggaggggtggaggaagaggaagggccaaactagctggacccgtcaccttctatcagaaagtaaaacctcgtcagaagtctgtttcctgctctctccctctgcatatcttcacttagatgcccttggcccgagccagctaccattgcacctctagctgcaaacaaagctaagacagcagggaacagaattgtcatggctgaatagaccaatcgtgttccatctactgagactggcacactgcctcctgcaataaaactgggatcccattaccaagagagaaatgcagaattgtgtaccagttagcttttgctgtgtaacaaaccatccccaaacttggcagctagaaacaaaccctgtattttcccacaatcctatgggttggcaatttgggctgggctcaacagggcagttctgctgctcacacctgggatccctcatggagctaaggtcagctgttacctcagctgggcctggatggtctaggatagccttactcacttgcctggcaggtgacaggctgttggctggaattgcttggttctcctccatgtggcctctccagcaggctagctcaggcttattcacatgatggcttcaggattccaaagagagtgagagtagaagctgaaagacttcttgagttcttggcctggaactgggactaggacagtgtcacttctgctaagttcttttggtcagagcaaatcacaaggctttacccagattcaagggatgagaaacagactacatgtcttgatgaggggaaccacaaagagcttgtggccatttttcacctatcacaaataattttggatgggtatttatttggataaaggtatttccctcttccccctttctctctgtctcatggggcctcactctgccaagttggaaggcactaagacattgtcctggccctcagggtctaggggaagaggtgttggggcaggaagtgagtctctccatgggctggacccactgtagtaggagtgcctccttgtctgcactgctggtatggggttaggccaggtaggacattccagaggggcttctgaaaaccaagagtccctggggaaagggaacagagtaaggcaggccttgttctcactgccctctaagggaacttggtcactcggcacttttaagcctcagtttctccagttcaataataaggacaagagcttttcccatgcattctctttccccgggaaagttgactgaggtgaccagtaatagaattgaaaagggagagtgtcttcagtgcaatgtggcatcctggattgggtcttggaacaaaaacaggacattagtgggaaaattggaaatctgaaaaaagtctgaattttagttaatataccaatttcagtctcttggttttgacagatgtaccatggtgatgtaagatgttgaccttggggtaggctgggtgaagggtatacaggaactctttgtactatctctgcaacttctctgtaaatctagtatcattccaaaataaaagtttatttaatttaaaaaaaaaaaaaaaaaaaaaaaaaaaaaaaaaaaaaaaaaaaaaaaaaaaaaaa

SEQ ID NO: 1670 - protein, 137 aa, Homo sapiens
MGLRAGGTLGRAGAGRGAPEGPGPSGGAQGGSIHSGRIAAVHNVPLSVLIRPLPSVLDPAKVQSLVDTIREDPDSVPPIDVLWIKGAQGGDYFYSFGGCHRYAAYQQLQRETIPAKLVQSTLSDLRVYLGASTPDLQ

SEQ ID NO: 1671 - protein, 109 aa, Homo sapiens [sequence omitted]

SEQ ID NO: 1672 - protein, 145 aa, Homo sapiens
MGLKSHVLPAPNSQGQGSLCIFVYVTSYMDYIQLQGKENLDCSGLNKQKIVFPHSMDSGDGWLMVLVQQLHEGRGHVLDPFALISVLVTSWSQDGCCIPKNHVCVQGRRGGGRGRAKLAGPVTFYQKVKPRQKSVSCSLPLHIFT

SEQ ID NO: 1673 - protein, 117 aa, Homo sapiens
MDYIQLQGKENLDCSGLNKQKIVFPHSMDSGDGWLMVLVQQLHEGRGHVLDPFALISVLVTSWSQDGCCIPKNHVCVQGRRGGGRGRAKLAGPVTFYQKVKPRQKSVSCSLPLHIFT

SEQ ID NO: 1674 - protein, 90 aa, Homo sapiens
MDSGDGWLMVLVQQLHEGRGHVLDPFALISVLVTSWSQDGCCIPKNHVCVQGRRGGGRGRAKLAGPVTFYQKVKPRQKSVSCSLPLHIFT

SEQ ID NO: 1675 - protein, 102 aa, Homo sapiens
MQNCVPVSFCCVTNHPQTWQLETNPVFSHNPMGWQFGLGSTGQFCCSHLGSLMELRSAVTSAGPGWSRIALLTCLAGDRLLAGIAWFSSMWPLQQASSGLFT

SEQ ID NO: 1676 - DNA, 1336 bp, Homo sapiens
ctctaagcagcatgtaacctggcctgcatccaggaaatagaggacttcggatccttctaaccctaccacccaactggccccagtacattcattctctcaggaaaaaaaacaaggtccccacagcaaagaaaaggaataggatcaagagatacgtggctgctggcagagcaagcatgaattcgatgacttcagcagttccggtggccaattctgtgttggtggtggcaccccacaatggttatcctgtgaccccaggaattatgtctcacgtgcccctgtatccaaacagccagccgcaagtccacctagttcctgggaacccacctagtttggtgtcgaatgtgaatgggcagcctgtgcagaaagctctgaaagaaggcaaaaccttgggggccatccagatcatcattggcctggctcacatcggcctcggctccatcatggcgacggttctcgtaggggaatacctgtctatttcattctacggaggctttcccttctggggaggcttgtggtttatcatttcaggatctctctccgtggcagcagaaaatcagccatattcttattgcctgctgtctggcagtttgggcttgaacatcgtcagtgcaatctgctctgcagttggagtcatactcttcatcacagatctaagtattccccacccatatgcctaccccgactattatccttacgcctggggtgtgaaccctggaatggcgatttctggcgtgctgctggtcttctgcctcctggagtttggcatcgcatgcgcatcttcccactttggctgccagttggtctgctgtcaatcaagcaatgtgagtgtcatctatccaaacatctatgcagcaaacccagtgatcaccccagaaccggtgacctcaccaccaagttattccagtgagatccaagcaaataagtaaggctacagattctggaagcatctttcactgggaccaaaagaagtcctcctccctttctgggcttccataacccaggtcgttcctgttctgacagctgaggaaacgtctctcccactgtttgtactctcaccttcattcttcaattcagtctaggaaaccatgctgtttctctatcaagaagaagacagagattttaaacagatgttaaccaagagggactccctagggcacatgcatcagcacatatgtgggcatccagcctctggggccttggcacacacacattcgtgtgctctgctgcatgtgagcttgtgggttagaggaacaaatatctagacattcaatcttcactctttcaattgtgcattcatttaataaatagatactgagcattcaatgtgaaaaaaaaa

SEQ ID NO: 1677 - protein, 250 aa, Homo sapiens
MNSMTSAVPVANSVLVVAPHNGYPVTPGIMSHVPLYPNSQPQVHLVPGNPPSLVSNVNGQPVQKALKEGKTLGAIQIIIGLAHIGLGSIMATVLVGEYLSISFYGGFPFWGGLWFIISGSLSVAAENQPYSYCLLSGSLGLNIVSAICSAVGVILFITDLSIPHPYAYPDYYPYAWGVNPGMAISGVLLVFCLLEFGIACASSHFGCQLVCCQSSNVSVIYPNIYAANPVITPEPVTSPPSYSSEIQANK

SEQ ID NO: 1678 - protein, 177 aa, Homo sapiens
TRPRRAAQGRREAPPGGEPEPRASLAAPGERSRSRAGDRGVEAGPRRGRGRNARCPGTGPNPPAARNGMARPELRPGGGGESRGGGDDGAACRRNAGQGRRGSGGARGARAERRRAGRQHPLGPHRRGAQRAAERAHPAAAVRVGPRQGAEPRGHDPGGPRQRAPHRCPLDQRGPGR

SEQ ID NO: 1679 - protein, 42 aa, Homo sapiens
LVCCQSSNVSVIYPNIYAANPVITPEPVTSPPSYSSEIQANK

SEQ ID NO: 1680 - DNA, 717 bp, Homo sapiens
  misc_feature 22, 586, 687, 714: n = A,T,C or G
aaaagaatttttgctttctttntctctaaattttccttccgtgctttgatgcgggctcgtttctcacgttccagtctgggaaaatggtccacataaggcaaggcaaagaatcgtttcctattgtatcttttatttaggtgccaaggtataacccactgcttgaacttgtgccagatgattcttccaaagatgtctcttctccaagcaccaggtctagctctttcttgaccagtctgaagaagccttagggcatcttctctttcctggacaactttatctaatgcatccatggaatctactaccttatctaaccgctctggacttggcattggcaatctctgccgcttggcctcctgctctagggttagaagcatgtttctttctttcagtaagacataccaaagtttgtgtaaatcttcattacttttgttccttagttgctgacaggtccatgctgctccagattttactttttcttgcccccagttttttgggtcatcaaaaaattcttctagtcctttccttgacaatgtggtatgaagtaatctatattggtgaaaggatgtcacatttggtgtactcttangcaacaaactaagaaaaaaccctgtcaggcagggacctgaggagttattaacgaaccgggaagaattcagggcggatgaaactctcctaccaagaaagggncaaaccgggccgcagccatgttttccncat

SEQ ID NO: 1681 - DNA, 305 bp, Homo sapiens
ctgtacatttaacaaaatatgtgcaagactgtcatggtgaaaactacaaaacaatgataaaagaaattcaagaaaacaaataaatacaggggtatactatattcatgaattgggagaatcaatatcattattaagtctcctcagattgatctatagattcacagaaatcccaattcaaaccctatcaggactatttgtagaaatagacacactgatgataaaatttacatagaaacacaaaggaagcagaatagccaaaaattattggggaaaaaatgtagttgaaggattcccattactccttt

SEQ ID NO: 1682 - DNA, 498 bp, Homo sapiens
aaattacactccataaatttagacatatgtctctccaagtaagtacgagctgattgggaacgggctccaatggacatggctctgcagtcaaaatagttagcagatggacaggtttggaaaatgtgagggcccatatcatcataaccagcaataaggagaccaacaccatatggtctccggccatatcgttgtgttggtatctgggtctcttagactggttaacgagcttgttttaacaaggaatgaagtactgtctttattttcaaattatacattattaacaaaggtctctggcttattctttaattgttgcataatccaccagagaaataatgcaataggacactatttctttggcctaatataaaatgtttgactttctaccgaacctaagaaagagtgccagcaaaataatttcttcccatctaaaacctgatttgttttggatacaagggggtctaggatttcttgggacatctagaaccattaagaaacttt

SEQ ID NO: 1683 - DNA, 322 bp, Homo sapiens
aaaaattaaaaatagcacaattctacaattctgattttaccaagaaaataaaccttttttggcacatattatcctatgaaaatggaaagctgagtcaggctgctctgcttttcacagcacaaataagcattcatgctatcagacttgggaaattaactcggtgacaaaaattcactggaaaatagaatccttggaaaaatggggtcaggtgccatccactgagaggcaatgataatgtgtgtccttcgttattagcacaaagttaggcagcacactataattttagctacatgcaactctataggaacacatgtgggtaagg

SEQ ID NO: 1684 - DNA, 293 bp, Homo sapiens
  misc_feature 51, 182, 188, 195, 203, 220, 246: n = A,T,C or G
aaaagatgctgcttccctgttttcttccaggaacacagagaccaacacggnttcaaacacagggcgagcttctcactatttcctgggaatgttacttctcagcccaacacttctcttcccaagaagttcaagttttgagactgtttttctccccggaacagtacttaaaaaaaaaaaaatcnttgatnttcaaanatgggttnttttcgtgtcctggaanagcatcagtaactaaatatcaagttntccacaatgctgccccccctggggggctaaccggatgccaagggaga

SEQ ID NO: 1685 - DNA, 390 bp, Homo sapiens
aaattgtctaactcctatcccagtttctttttatagtctaaaaacaaggaatcacccaagtaagatactccttcagagcactgctgaaaacggatcaaacgtagagatcccccagatccctgttctcaagtgttaaaaatattttatattagcacatagaatacccttagatatattctgttatgttctaaagagtttgtgtttccccctttttgatgatgtcttcaatttcttctgagacctttcctgtatagtcatttggttctattgcttttaacttctcttgatactccagcggcaaaccattttcttttgcacccatgcaaataatctttttatactgtggggatgggggagcactttcgtaatttgtcatcagataacttcgac

SEQ ID NO: 1686 - DNA, 549 bp, Homo sapiens
gggtccagtccaacctgctcctcattattgtaaacatgtgcagaatcaatatggtggaacccggcttctattgccaatttgacggcctctagagctttacttttaggaacctgggggagcaaccaaacgtaatattttctgactaatgtgcctgagagttagttcgggcacaagcagcaacgttcacaaaaatcagcttttcctcctttcttggatgagctctgtatgtagaatcataagcccatcccagtctgactgggtctttcccatttagtaataaaggttgggcatagcaggaacttctgcagtcccagaaaaatcactgaaagtggaagtgtccccaaaacaatttcactttcagtgattttttggaaaaatcaacaggacgcaactatagttacagacataatcttaattatttttagtatggtgaaattaacacaaggaaatagccacatggaaggaattatgaaggaatgcagtgtaagctcctgtgattcctctcccaccatgttgcacagagcgcactgactttatccagcatcatat

SEQ ID NO: 1687 - DNA, 442 bp, Homo sapiens
  misc_feature 34, 50, 67, 382, 384, 385, 435: n = A,T,C or G
caactgcaaatgaagatcctttttggatacttgntgagaaagacacattngggggggggttgtgacnaaaataacgatggccggcttgatccccaagagctgttaccttgggtagtacctaataatcagggcattgcacaagaggaggcgcttcatctaattgatgaaatggatttgaatggtgacaaaaagctctctgaagaagagattctggaaaacccggacttgtttctcaccagtgaagccacagattatggcagacaggctccatgatgactatttctatcatgatgagctttaatctccgagcctgtctcagtagagtactggctccttttataatttgttaccagctttacttttgtgataaaatattgatgtngnnttttacactcttaagtcttaaccacagtcacaattatcttaatgtagatnataattg

SEQ ID NO: 1688 - DNA, 340 bp, Homo sapiens
  misc_feature 23, 52, 56, 58, 60, 62: n = A,T,C or G
ctgccagctaacagcaagagctntgagggcatcactgaacagatagcacctnatgngntntnatgattcaaaaatctcccttgctgttggatttaccaacacgtaggcttttatttcttcccattacatctgtttagccacagaaagcatcgggccatactcactgcagaagataagacttcctcagaatcttatttgtttagtgcactcaattttacttcactgtctcatcacttgagagactggttaaggcaagaaacccatttcttaacattttttttgttttcaaacatttgaaaagcaacaccaaaacgtatgcagttaattcctcaattctttc

SEQ ID NO: 1689 - DNA, 140 bp, Homo sapiens
  misc_feature 61: n = A,T,C or G
ccagagggcctgcacatgcaatttccagtccctgccttcagagagctgaaaagggggcctnggtcttttatttcagggctttgcatgcgctctattccccctctgcctctccccaccttctttggagcaaggagatgcag

SEQ ID NO: 1690 - DNA, 485 bp, Homo sapiens
gagattattacccagaattcacatgtagggatggggaaggacaatttttttttaactaaaaaagttggcggcaggggtggggggtggcaatcatttttcttcctatacatacaaaggatattgtcaaaaatggcgttcttctcttgtggcctgttattctgattgctgctgtatacagttttgtcactctttagtttttagttaagcatactgatagactttcctctaaaagccattcactccagattttacctggggaatattctacatactgcttactttctctataaaactcatcaataaatcatgaaaggcactgagttttgtaaatcaggaccctaaatgtttaattgtaaataagtttcagataattattatagctttgcgttgaagtttgttgttttttttctcaactagttaagtcaactgcttctgaaataactctgtattgtagattatgcagatctttacaggcataaatattt

SEQ ID NO: 1691 - DNA, 342 bp, Homo sapiens
  misc_feature 11, 24, 26, 49, 50, 51, 53, 61, 62, 142, 173, 190, 193, 242,250, 291, 303, 304, 315, 329: n = A,T,C or G
gaagaaacaangatgacttttttnanaacaaagcataatgctggcaatnnngnggggggtnnagttttccaaacatgttatcttaaatacccctttatccttacaggttgacataactttgaatgttttaacagcaagaatnttaagaaaagataaacaccattttatttatntataaaaacaaaattanttncaaatatttttgacattgtgattttttttttccacatttctcagcaaanctaatggnattttaatcattatttttgcctgtcataagaaaactcttanctgaaatggccnnaaaactgtganacatgctatggaanctgaatgccggac

SEQ ID NO: 1692 - DNA, 450 bp, Homo sapiens
  misc_feature 23, 59, 60, 409, 417: n = A,T,C or G
aaaaatggggccccaaagactgntaagagctcatccccgtggtctcctatcaccggggnnggggttcatgtctgatgagaagcttggacggtactgaaactcatacatgtaggtgggtgctccagcatctctgtggttccgggccacaatcacagatgggacaccaaacatcacatctgctatcaagtccaggaacaggtctttctttttgacagtgtcgtctgttcctcctaagtatttctcagtggcttctggaatcagttccttagcaatgcaaacaaggggataggacttccacaggagtgacatggctgtcttctggtccagttgcccttcggagagtggatagctcatcaactgcattggaatcaaccagccaaactcctgcttgttaattccgaccatgtangggacagngtggaaattcctttcagcttgaaagctcttcag

SEQ ID NO: 1693 - DNA, 436 bp, Homo sapiens
  misc_feature 20, 51, 52, 58, 62, 286, 323, 333, 375, 385, 399, 401, 402,407, 410, 426, 432: n = A,T,C or G
ctattttattaacatcatgntttaataaataactggctacttctaataaanngggggnctcngtttacaacagcccccaatattccattttgaccactctgcagaatttggtgtaaaaagttgaatgaaatgtagaccctgagctatcaagtaattatgtttcaatataaaaatagagaattactcttacaactgaagattgaacaataacacaaacaacctctttgtgggttttaggttcggtaaaattagttgggatcttaatggctgtctaaagcaggaaganacagaattttaatctttctgaagacttctgggaactnctttgaaagngatttgttaccttatcagagtttatgagctattattttggtnaaggcacaangaaaggattcccangnngttgntantcttttgccctggacnacaaanattg

SEQ ID NO: 1694 - DNA, 313 bp, Homo sapiens
  misc_feature 29, 32, 34: n = A,T,C or G
attatctgcaaggtttttttgtgtgtgtnttngnttttattttcaatatgcaagttaggcttaatttttttatctaatgatcatcatgaaatgaataagagggcttaagaatttgtccatttgcattcggaaaagaatgaccagcaaaaggtttactaatacctctccctttggggatttaatgtctggtgctgccgcctgagtttcaagaattaaagctgcaagaggactccaggagcaaaagaaacacaatatagagggttggagttgttagcaatttcattcaaaatgccaactggagaagtctgttttt

SEQ ID NO: 1695 - DNA, 522 bp, Homo sapiens
ccattttcaggggaagcttgggagagcaatagtatggtgagccccttagagatgagcgcctactccttcttggcgaatgctgccttcagatgcttaccaagtggtcactgcatctagtaagattatatttccagtacacttccttagggcagaaacaccatcctatcaggtttggtcagtcccttcttcatgaagggagtcatggggaattcctgaaaattttcttccttctgcagacagttggatgagtcccttagagaaggcatccagagacataactaaactgaatatcatcccatattgattttaggaattgactctaaaactctgtgcagaatcttgtgttgggattgtatcttgacattcctgttgtgttatttttcttaactggagtgtgtgctgcctttcaggtacaatttttgtgtaataaaagccagtgcattaagtttatatagactactttctatgcaagactgagatatggaatagataggaagagatatgtactgctgggtacatgga

SEQ ID NO: 1696 - DNA, 174 bp, Homo sapiens
  misc_feature 52, 55: n = A,T,C or G
ccagccattgcctggcatttggtagtatagtatgattctcaccattatttgncanggaggcagacatacaccagaaatgggggagaaacagtacatatctttctgtctttagtttattgtgtgctggtctaagcaagctgagatcatttgcaatggaaaacacgtaacttgttt

SEQ ID NO: 1697 - DNA, 561 bp, Homo sapiens
  misc_feature 22, 55, 56, 198, 265, 374, 378, 399, 410, 465, 543, 549: n = A,T,C or G
ctgtaatgttattgcagatccncatctctcgctcaactgttaatgtctcaacctnnagaggcaccccacccagcacactgtcagtaaaggggcagattgaaacagtgagagttaagggtacagtagaaaattctgcatgtttgcagtgactagaatcagatagtagtgtggtggtttttttttttaatcattatgaanagtgggagcttgcaggtaaggcttctgtggtggtttgaaaagcagaaagcaataaatgaaacaaagngtttgtgtaatatattcctgccttgtcttcttcactcagagttgaaataggttttgcagtaaagctggaaaaaaaaagaaaacaaatgttcaaaactgtgtgtgttggngggnggaatttcctttgcttatagnagtttcagagnaactatatgttttttttcctttctttttcacaggcacagaaaactgaatctgtanataacgagggaaaatgaattgcatgaaaaattggggttgattttatgtatctcttgggacaacttttcctcggccgcnaccacnctaagggcgaat

SEQ ID NO: 1698 - DNA, 267 bp, Homo sapiens
  misc_feature 58, 62, 63: n = A,T,C or G
cgaggtctgccctcgattgtgtatttctgttggatcaaacactcccatgttaccactnggcnncataatgtatcgatatatattccaagtggcaacaggtaagttgagaaggaagatgaaccagtgcaatgacatgagcagtaatacagtgacaatggtatggccacttaaattaaaaatataacaaaattgaaaaatagacatataaccaaaaagattctaaatcttgcaaggaaaaaaagaataaagctgccaataagttatttt

SEQ ID NO: 1699 - DNA, 449 bp, Homo sapiens
tgttaagattttttttgctacaaagaggaggtggcaatggtagatccacccttatgcttctcagtttagcataacctcttatggattttcatcaaattcagcgtgttggtcactggaaagagccttttccttctccttttcttactctcccctcatggtgttcccctcttaaaggagaggagcttttaatttacacttaccacctcatttgcttttctggaggccatgcaatataggcgggactacagagttaatctcctttttacaaatgaggccaagagaagcctcattggttcacagtcatgcagctcatactgtccacccttgtattctcagatgcaggacaattgcattttagttttattttgtggaggtgcagaatatttactctttctgtccaacccttgattctgccgaggaagacactgatggtttgatgagtgattcag

SEQ ID NO: 1700 - DNA, 398 bp, Homo sapiens
acatttcacaaataagatgtagctttccaaacaaatccattcgatgaccattatcacaactatattttattctaatttataaaacaaaaaatggttagacaagcacatgatatcaagagtcttcaacacagtggattccattttattaagaaaaaaaatagaaaacaagtagtccttaaattgtcttagctctccatagcatacgttatataaaattaaagttttgcttccaaaaatatgtttccatgtggtcgtggtgttgtccagtgctattagggccaaagcaccaaagacatgagaagtttaaccatcgacttgtcatttttcataaaagctaaacatttccttataggtctggagtaaaatcttctaggcattttagtgctaaaagtcacttt

SEQ ID NO: 1701 - DNA, 257 bp, Homo sapiens
  misc_feature 4, 12, 13, 27, 47, 53, 61, 63, 76, 77, 78, 79, 86, 87, 88,89, 92, 93, 97, 100, 101, 103, 127, 129, 130, 133, 134,141, 142, 143, 147, 149, 152, 155, 164, 166, 174, 185, 188,194, 203, 205, 220, 228, 237, 238, 240, 241, 246, 251: n = A,T,C or G
aaanaacactannggaccttagagatnataactgtttgataatttgnctcagncgtattgncntaaaagatatatnnnnggggggnnnntcnntgtnaanngntgtttggattgcctgatattatancnnggnngttgggnnntatntnacncantatacctcngncgcaaccncgctaatggcnagnatcatnacactggcngncgttactactggatncgagctcngtgccaatnncnncgtcntcatngcccta

SEQ ID NO: 1702 - DNA, 526 bp, Homo sapiens
  misc_feature 9, 476: n = A,T,C or G
acctaattnattgaagtaataaccaaataattttcaatcttgattcaactgtgattcaaatcttacaccatttgcccacttctatgaattttatgtataaaattttttaagagtcagagttttttttcttgattaattggatgtatttcacagaatttccaactgctcacgttagttttcttccttttagagttgatctctctaatgtattagatcttcatgcctttgatagtctctctggaataagtttgcagaaaaaacttcagcatgtgccaggaacacaacctcaccttgatcagagtattgttacaatcacatttgacgtaccaggaaatgcaaaggaagaacatcttaatatggttattcagaatcttctgtgggaaaagaatgtgagaaacaaggacaatcactgcatggaggtcataaggctgaagggattggtgtcaatcaacgacaaatcacaacgagtgattgtncaggggggtccatgagctctggtgatccgggaggagactccaatgagctg

SEQ ID NO: 1703 - DNA, 116 bp, Homo sapiens
gacctccgaactgagctctaatttagctgatcagattttgcttgggtaaagttcctttttaatgttctaaagtgtttacggttctcaaatatcagttaaaaactaattttaggtgg

SEQ ID NO: 1704 - DNA, 241 bp, Homo sapiens
  misc_feature 209, 230, 235: n = A,T,C or G
aaaaattgtgtaattgttaaatgtccagttttgctctgttttgcctgaagttttagtatttgttttctaggtggacctctgaaaaccaaaccagtacctggggaggttagatgtgtgtttcaggcttggagtgtatgagtggttttgcttgtattttcctccagagattttgaactttaataattgcgtgtgtgttttttttttttttnaaggggctttgtttttttttntcaanaaaaat

SEQ ID NO: 1705 - DNA, 336 bp, Homo sapiens
  misc_feature 9, 12: n = A,T,C or G
ggtcctgtntanacacacatcaatatgaaacaaaaaaaatttatataaataagtcaattaaacttcacaaaaactaaagaaacacaagacaaaaatccaacaagcaataaaaactgtacaatattggtcagtcttttatatctgaaaaatgtgtaacttaaaaaaaagttatttatcgtataaaaaaagtcttttacatctgtgttagctggagtgaaaacttgaagactcagactcagtggaaacagatgaatgtccacctcgctttcctttggagaggatcttgaggctggaccctctgctcacagaggtgagtgcgtgctgggcagaggtttt

SEQ ID NO: 1706 - DNA, 107 bp, Homo sapiens
agggtggctctgggagcagttgtgctgcgggcttgctgggggagaactctaactgttgcagaaacagagcttcatggcttgcttaaattacttagctggaatatttt

SEQ ID NO: 1707 - DNA, 512 bp, Homo sapiens
  misc_feature 468, 470: n = A,T,C or G
ttttttgtctggtaattatatatttattatttagcaaaactgaagaaaaaaagcacagaattgtttcaacagatgtctctcattttcagctagcatttctctcccaagttgagctggtttaatgtgttttggatttccctcctcaattggcttattttttagatcacctgcaattcatttgcaaattgcaataaaacacattttagaaaaaaggaaccttcaattattagctttgtttctttttaaatgtatatattttgactaatgtttgtgaatgaagttggctaacatgtatttagtttcattttggcggtatgtaatataaagtttttaaaattttaaatatggttttaacctttatgtgtaaatgattttctagtgtgaccttctaatttaatattagacgtctaaggtatatctgtaaattagaatccgactatcactctgttcattttttttgaacaaagngnttaaagaaagcctgaaccagggaaaaaaaaaaaaaaaaaaaa

SEQ ID NO: 1708 - DNA, 203 bp, Homo sapiens
  misc_feature 28, 36: n = A,T,C or G
aatcttctaaaggaagaacagacccccnagaataanattacagttgttggggttggtgctgttggcatggcctgtgccatcagtatcttaatgaagactataatgtaactgcaaactccaagctggtcattatcacggctggggcacgtcagcaagagggagaaagccgtcttaatttggtccagcgtaacgtgaacatcttt

SEQ ID NO: 1709 - DNA, 271 bp, Homo sapiens
  misc_feature 1: n = A,T,C or G
ngttgaaaaaatagatccaatcagtttataccctagttagtgttttgcctcacctaataggctgggagactgaagactcagcccgggtggggctgcagaaaaatgattggccccagtccccttgtttgtcccttctacaggcatgaggaatctgggaggccctgagacagggattgtgcttcattccaatctattgcttcaccatggccttatgaggcaggtgagagatgtttgaatttttctcttccttttagtattcttagttcttcag

SEQ ID NO: 1710 - DNA, 239 bp, Homo sapiens
  misc_feature 58: n = A,T,C or G
tacaaaatattttaattgtaagtggtcagaggaattcttctggtttctcccttatggntatttttaatttgtacaatagttgcttctgtcaactcagcgacaatgccatcatagctttcaaatgagatcaccctgtagatcgatggactatgccttaaagttgcagatgcataaaggagactgaggacaaatggtgaaaactgtagttactgaacccaaatgttactcagagatatcaa

SEQ ID NO: 1711 - DNA, 122 bp, Homo sapiens
agtgtaagtgaacacagaagagtgacatgtttacaaacctcaagccagccttgctcctggctggggcctgttgaagatgcttgtattttacttttccattgtaattgccatcgccatcacag

SEQ ID NO: 1712 - DNA, 169 bp, Homo sapiens
ttcccataaataaaagtacagttttcttggtggcagaatgaaaatcagcaacttctagcatatagactatataatcagattgacagtatatagaatatattatcagacaagatgaggaggtataaaagttactattgctcataatgacttacaggctaaaattagtttt

SEQ ID NO: 1713 - DNA, 392 bp, Homo sapiens
tgacagagaggatggcgctgtcgaccatagtctcccagaggaagcagataaagcggaaggctccccgtggctttctaaagcgagtcttcaagcgaaagaagcctcaacttcgtctggagaaaagtggtgacttattggtccatctgaactgtttactgtttgttcatcgattagcagaagagtccaggacaaacgcttgtgcgagtaaatgtagagtcattaacaaggagcatgtactggccgcagcaaaggtaattctaaagaagagcagaggttagaagtcaaagaacatattcttgaaagttatgatgcattcttttgggtggtaacagatcataaagacattttttacacatcagttaatatgggattattaaatattggctataaaa

SEQ ID NO: 1714 - DNA, 301 bp, Homo sapiens
tgggagggatattttcccacaggaacaagggtctccgtgatgacacggggtctctatagtcatgttgagagcctaatggcccttggcataattgctggtgttggggtagaaggtgtcttggagtttgctcaagtggttgagagggagggaggtgccatagacttggaggaactggcacgaagccaaggatacaaatccaggcagggctgtggggcaggatagggagcagggccttctactgaaggagtgactcaggaaggaggaggggaaggtgacaagcccctgggcaggagccctgtgg

SEQ ID NO: 1715 - DNA, 194 bp, Homo sapiens
taaattcaggctaacttctgaaaatcccgttttattcacctcactgtggtaccagtaactatactgagtcaggttactttacagttaactatgtcacctaaaacacaataatccattaacactctaataacagttattgggtgtggtcatactggaaattcttaaccatatagttgtcttgccaattttttttt

SEQ ID NO: 1716 - DNA, 185 bp, Homo sapiens
gtaggaatgggttcttggtacacaagatagtattgttgagctagttttcgagctctgtgcacaagcactctttaattcccacggacggggctcctccagctacagcagccaaagcatattcaatctggacaagtttaccagacgggctgaatgtagtcagcgaaaaactgtacccgcgctccgcc

SEQ ID NO: 1717 - DNA, 296 bp, Homo sapiens
  misc_feature 3: n = A,T,C or G
aanaggctcttggtggagaggactgtgaagccgtcggcaggtgtgccctcggttgtgccgtcggcgctggctgccttactgacttcaccctgcttcttcttggatttccgggcccctttcttgcctcctgcttttttagatgcaggcttcttctgggatggagacttggcctttttggctgggggtggtgtgatgatggcttccaactttcctttggatccccgcttcttcgctagcaactcggggtggatgttgggtaacacacccccactggctatggtgactccttttagcag

SEQ ID NO: 1718 - DNA, 343 bp, Homo sapiens
  misc_feature 208, 322, 341: n = A,T,C or G
atggcattaattgttccttgcttttatagggtgtattttgtacattttggatttctttatataaggtcatagattcttgagctgttgtggtttttagtgcacttaatattagcttgcttaaggcatacttttaatcaagtagaacaaaaactattatcaccaggatttatacatacagagattgtagtatttagtatatgaaatattntgaatacacatctctgtcagtgtgaaaattcagcggcagtgtgtccatcatattaaaaatatacaagctacagttgtccagatcactgaattggaacttttctcctgcatgtgnatatatgtcaaattgtcangc

SEQ ID NO: 1719 - DNA, 193 bp, Homo sapiens
tcgaggacccccgagatgcagaggatgctatttatggaagaaatggttatgattatggccagtgtcggcttcgtgtggagttccccaggacttatggaggtcggggtgggtggccccgtggtgggaggaatgggcctcctacaagaagatctgatttccgagttcttgtttcaggacttcctccgtcaggcag

SEQ ID NO: 1720 - DNA, 176 bp, Homo sapiens
  misc_feature 30, 91, 145, 168, 170: n = A,T,C or G
tgattcagaattttttttaatgaaaggatnattgcactaaccttcttcctgctgctctgattctgcatttgtggtacttgtgactacgttntttcaaatatagatagatttaagctgctaatttttttttttttagtaaccactnctatatcatgtcttttactctgntnataata

SEQ ID NO: 1721 - DNA, 128 bp, Homo sapiens
  misc_feature 9: n = A,T,C or G
tattcttangaaacttccctaatcccttggaaattcccgggtccttcaagaataaaaaaaaaagggtcaagaagaacaaattaccaaagggaaagaatggctttcaatataataaggtccatttttta

SEQ ID NO: 1722 - DNA, 285 bp, Homo sapiens
  misc_feature 34, 140, 165, 170, 230, 255: n = A,T,C or G
ttatgaagttgacaaataaataaaaggtagtggntatgtctgagcttattgtgtttgagctaacaccaggttactcagtaaccatgacctgctcctccatttccatttattctcaacattaaatagttttatcttgttgntgccagaaatgcacttgtgccaggnattgnccctgctgtatgaaaagcttcttggcaatgaattctgtaataagtgccctacattatggntttctggtggaattggtttaacagngacaacccaggatttccaatatatttttgt

SEQ ID NO: 1723 - DNA, 536 bp, Homo sapiens
  misc_feature 33, 66, 67, 68, 406, 437, 450, 462, 498, 515, 516: n = A,T,C or G
cttggcttgcaggtggcaccttctcactatgtnctcacatggccttttctctgtggagagggacannnagcatgagcaggctctggtgtctcctcttcttataaagacactaatatcaccatattagggcttaaacctatgacctcatttaaccttaaccccttaaaggtcccatctccaaaaacagtcacatagcaggctactgcttcaacatatgcatttgggggaggggacaccattcagttcttaacagggtggtcaccgcaaacatggaaagtcagagccttctccccttcagaattcccgcccccacccagggatggggaagaggagcagagaggtatgggaagcagacacggagagtggcaggtaccatgctggggtgggctcaggagtgctttcgganggacatatggaactggcagggctcaatgcanggagggcggaagnccttgggaagancccgtggcctgagaaaggggctgggctacaaccctnggcaagttactttaccnntgaccttcgatgcttttggg

SEQ ID NO: 1724 - DNA, 145 bp, Homo sapiens
  misc_feature 4, 12, 27, 32, 45, 47, 48, 59, 61, 65, 93, 98, 103, 121: n = A,T,C or G
ctgnccttttgnaacaggaccctcacnctatncaatggggggttnanntgaagcatgancntatncatgcggaaaacccaactcatgtgagcncaaancggancgacccagacaaccatgnatgcggctaatatggggagagaaa

SEQ ID NO: 1725 - DNA, 173 bp, Homo sapiens
caattctggaattacccacttgtttaattttgagcaacatgatctagcattaatgtagtcacattctaaatcagacaatgtaattatgaagtagaccgagaggaagatgagcgcgcaacaatcgaggagagagaagacgaacaccaccgcctccatcctcctcctccgtcgcc

SEQ ID NO: 1726 - DNA, 302 bp, Homo sapiens
acccgttggaaatgggccatggtctaatttggtgttgaaataaactaacctctttggctgtttctcccaaactgccaccagccaggcaaggccaatccaatactgactgctggctgggggagctcgtaatgggtgatgccgccctgctttttgcatatgtcaggctaacaggtgctttatttccagagaattgttaatgcccttttttgaaaagagcagcagaaattccggacaagaatctgaaaaataggtgtcaaaaactatttcccagaaggtagctgtacaggagtttgagtctccag

SEQ ID NO: 1727 - DNA, 274 bp, Homo sapiens
  misc_feature 3, 4: n = A,T,C or G
ttnngttgaaaaaatagatccaatcagtttataccctagttagtgttttgcctcacctaataggctgggagactgaagactcagcccgggtggggctgcagaaaaatgattggccccagtccccttgtttgtcccttctacaggcatgaggaatctgggaggccctgagacagggattgtgcttcattccaatctattgcttcaccatggccttatgaggcaggtgagagatgtttgaatttttctcttccttttagtattcttagttcttcag

SEQ ID NO: 1728 - DNA, 415 bp, Homo sapiens
aaatccctttctgcttccactggaggcaaaactgaacaaaatgttagttaaatagagagagcagcatttctaagaaatctgtggtcagcattatagaccatctatgctacaaggatgtcattaaataggatttgttcaattactggattcttcttctatgatcagttatagaatttctggtttatatctctgattcataaaactgggactccactttttgaagatacatctgattgatttttttcagtcatgatttaacagacttctttgagatgctcattttaacatttacataatttataatcccaaatgtataaaagacaatgaaaaaagcatcataaataaataatgcaaaatgaaatagttatgtcagacttttggaccttctgataaattagcaaaactgtaacagaaa

SEQ ID NO: 1729 - DNA, 309 bp, Homo sapiens
  misc_feature 4: n = A,T,C or G
acanaccgtatactttatgcaaacaaagtgatgcctcactgacttaggagacaagtcacatgccatcagtgtgtcagaaaatttctttcttcagtgatagttaaggtaacctcgccagctactttccagagacagctccagggcaatactggggaaaaaaaaatcagagacataggaccccaatagagccctgtgcaacaaaaagatgctagataacaaaactcaaagcaaaactaagatcattccaatttaggggaaagtttttttattcagtgtttaagattaaaaactacaagattttgcttgcag

SEQ ID NO: 1730 - DNA, 285 bp, Homo sapiens
  misc_feature 2: n = A,T,C or G
anctgtactgtatttatgttgctattggtcaaaagagatccactgttgcccagttggtgaagagacttacagatgcagatgccatgaagtacaccattgtggtgtcggctacggcctcggatgctgccccacttcagtacctggctccttactctggctgctccatgggagagtattttagagacaatggcaaacatgctttgatcatctatgacgacttatccaaacaggctgttgcttaccgtcagatgtctctgttgctccgccgaccccctggtcgtgagg

SEQ ID NO: 1731 - DNA, 244 bp, Homo sapiens
cattaccttgctaaaatttccactaagctacagcttcagatatttacaagaaaaataaatatcttttaacagacttcaatgtggtttaacagcaagctagctgaggagttgtattttgttgttatttcaggtaactttttattaagaaacagttaatatttcagcgattacaatttcaggtgttcaaaactcaagaagggtcatcattatactctgaagcagaattcttcaggtactcatcttt

SEQ ID NO: 1732 - DNA, 272 bp, Homo sapiens
  misc_feature 9, 65, 192, 210, 212: n = A,T,C or G
ctgggaagncagttcgttctctcctctcctctcttcttgtttgaacatggtgcggactaaagcanacagtgttccaggcacttacagaaaagtggtggctgctcgagcccccagaaaggtgcttggttcttccacctctgccactaattcgacatcagtttcatcggaggaaagctgaaaataaatatgcangagggaaccccgtttgcntncgcccaactcccaagtggcaaaaaggaattggagaattctttatgttgtcccctaaagat

SEQ ID NO: 1733 - DNA, 388 bp, Homo sapiens
  misc_feature 2: n = A,T,C or G
anttggaagagcatatgaacacgggccagctagcaggattttcacatcaaattagaagtctgattttgaataatatcatcaataagaaggagtttgggattttggcaaagaccaaatactttcaaatgttgaagatgcatgcgatgaataccaacaatatcactgagctagtgaactatttggcaaatgacttaagtttagatgaagcttcagtcttgataactgaatattcaaagcactgcgggaaacctgtgcctccagacactgctccctgtgaaattctgaagatgtttcttagtggattatcgtaaatcactgaacctttttttcaagaaggacaagaattttggagtctgctattaatgggaccatatttattacagttttt

SEQ ID NO: 1734 - DNA, 282 bp, Homo sapiens
tttggaatgtaaaattaatggtatctggtatcaagttgtaagaaaaactcccccagattgggaggtaactgagtgatatgtgaaagaatcttcccgtctgaatttaagaatacacctacactgggcagaaaaaggtgggggagaggaagtagaagtagaggaaaagcacaactccactggcttcaatcaaactgaggtaactaattagagacggaaaataaataaatcaacaaatgccccatttttgttttccaaaaaagatcactggcaactaacaatttt

SEQ ID NO: 1735 - DNA, 268 bp, Homo sapiens
  misc_feature 1: n = A,T,C or G
ntaagccagccttcctcaagaatgccagacagtggacagagaagcatgcaagacagaaacaaaaggctgatgaggaagagatgcttgataatctaccagaggctggtgactccagagtacacaactcaacacagaaaaggaaggccagtcagctagtaggcatagaaaagaaatttcatcctgatgtttaggggacttgtcctggttcatcttagttaatgtgttctttgccaaggtgatctaagttgcctaccttgaattttttttt

SEQ ID NO: 1736 - DNA, 478 bp, Homo sapiens
  misc_feature 2: n = A,T,C or G
tnatagacttttccaatggcccccttataacaccagaaaggattgtaatcttgggcgtattttgtgctggcatctttggcagttgtgaagatcttgtaccagagcgtggcgttgctgtacgtgtcaggaacacagtgcggtggctgtacagtgacggggaacaccccagggctggccgtgagggtcatgcaggctgtgaataccacctgctcacagtgaccgtggagggcgcagtcatctgagctccacgctgtaggcagggtgaaggtgatgtttatctcctcgtgggcttccctgcctgaaagtccaatctgatgccctaagatggttgagtacagatgggtgacgttgcgggaataccctccgaagggtttcagtgggtccagggttagggtgattgagactgagatattcaccgggcccgagtcctccagggcctggggggactgggtggaagctcgggcctgcccgctggtca

SEQ ID NO: 1737 - DNA, 489 bp, Homo sapiens
  misc_feature 5: n = A,T,C or G
ctttnaggatggcgagtagcagcggctccaaggctgaattcattgtcggagggaaatataaactggtacggaagatcgggtctggctccttcggggacatctatttggcgatcaacatcaccaacggcgaggaagtggcagtgaagctagaatctcagaaggccaggcatccccagttgctgtacgagagcaagctctataagattcttcaaggtggggttggcatcccccacatacggtggtatggtcaggaaaaagactacaatgtactagtcatggatcttctgggacctagcctcgaagacctcttcaatttctgttcaagaaggttcacaatgaaaactgtacttatgttagctgaccagatgatcagtagaattgaatatgtgcatacaaagaattttatacacagagacattaaaccagataacttcctaatgggtattgggcgtcactgtaataagttattccttattgattttggtttgg

SEQ ID NO: 1738 - DNA, 262 bp, Homo sapiens
gttacagatgacatgtatgcagaacagacggaaaatccagagaatccattgagatgtcccatcaagctctatgatttctacctcttcaaatgcccccagagtgtgaaaggccggaatgacaccttttacctgacacctgagccagtggtggcccccaacagcccaatctggtactcagtccagcctatcagcagagagcagatgggacaaatgctgacacggatcctggtgataagagaaattcaggaggccatcgcagtgg

SEQ ID NO: 1739 - DNA, 422 bp, Homo sapiens
ccaccatccttttgagacagttcctatcaacaatcttgaaccatactaatacattacttgttcctgaagtccttttgttgtagctcataataaaataagcaatacaaatgaattatctgtatttaagggaaaagaaacatttacaagaaaacacaaaaatataactgttataattcattatgaataaatatacactttgaactggctaagtacaatctttatacattgtttaagatttaatacagtttattagccattttcttttttcacacaatgtatatcaaaattaaaaaaaaatactgatttatagaaaaatggcaaagtacagtagttccattccaatttgaagggccatgaaaagccactgcaagaccttttagcctaattcaaacctgtaaacatgttcagtcttttttacctgc

SEQ ID NO: 1740 - DNA, 92 bp, Homo sapiens
gctaaatacctatctaatgtgctatgtttatcaaatcgtgtactaaaatggaaagctagttttgagaaattattcagaagccttgttatttt

SEQ ID NO: 1741 - DNA, 188 bp, Homo sapiens
tttcaattcttccaaaaggctcaaagatcccacgaagcatatcttcagttatgttgaagtgtaatgagcccacataaagcctcataggtccagcacttcccttttgtaaattgtttgccattgctgcagctctgtttttttctgcctgtgatgcctgtactatgattggcacgcctaaaactcgttgg

SEQ ID NO: 1742 - DNA, 285 bp, Homo sapiens
  misc_feature 3: n = A,T,C or G
ttnaaaatactttcaggctccaccaaaacgtagaactgaaagcatgtattttggaagaaagagatacattttgtatgctttcttttccttttgtagattcccagtttattttctaagactgcaaagatcactttgtcaccagccctgggacctgagaccaagggggtgtcttgtgggcagtgagggggtgaggagaggctggcatgaggttcagtcattccagtgagctccaaagaggggccacctgttctcaaaagcatgttggggaccaggaggtaaaactgg

SEQ ID NO: 1743 - DNA, 117 bp, Homo sapiens
  misc_feature 2: n = A,T,C or G
angatctatagacactttaggcaaaacaggctcataaagcaattaaaaaatcaacaatttagtaaaaacaggctacatagtattttgtttttacgtttcatttgtctattgatcttt

SEQ ID NO: 1744 - DNA, 111 bp, Homo sapiens
aaacaatgggctaaaaataaacagtattaaaaggttaagtttatataatacatatgtacacaattagtggtgttttcttttcagacaaaatactgaaacaaatattagttt

SEQ ID NO: 1745 - DNA, 305 bp, Homo sapiens
ctgccagtagacccccggtcaccctgaggctggtggtccctgctagtcagtgtggctctctcattggaaaaggtggatgcaagatcaaggaaatacgagagagtacaggggctcaggtccaggtggcaggggatatgctacccaactcaactgagcgggccatcactattgctggcattccacaatccatcattgagtgtgtcaaacagatctgcgtggtcatgttggagtcccccccgaagggcgcgaccatcccgtaccggcccaagccgtccagctctccggtcatctttgcaggtggtcag

SEQ ID NO: 1746 - DNA, 319 bp, Homo sapiens
aaaataagtgaataagcgatatttattatctgcaaggtttttttgtgtgtgtttttgtttttattttcaatatgcaagttaggcttaatttttttatctaatgatcatcatgaaatgaataagagggcttaagaatttgtccatttgcattcggaaaagaatgaccagcaaaaggtttactaatacctctccctttggggatttaatgtctggtgctgccgcctgagtttcaagaattaaagctgcaagaggactccaggagcaaaagaaacacaatatagagggttggagttgttagcaatttcattcaaaatgccaa

SEQ ID NO: 1747 - DNA, 177 bp, Homo sapiens
aaatccttttcccataaataaaagtacagttttcttggtggcagaatgaaaatcagcaacttctagcatatagactatataatcagattgacagcatatagaatatattatcagacaagatgaggaggtacaaaagttactattgctcataatgacttacaggctaaaattagtttt

SEQ ID NO: 1748 - DNA, 237 bp, Homo sapiens
  misc_feature 9, 12, 15, 25, 172, 225: n = A,T,C or G
ctgaaggantgnaantagactggtngagagaggaaggcactgagccacatgaaggtatgtacgtaggttttgttcagtggaaatagactggtagagagaggaaggcactgaaccacatgaaggtatgtgtgtaggttttgttcagtggaaatagactggtagagagaggaangcattgaatcacatgaaggtacgtgtgtaggttttgttcactgacttcttcantgtctcagccag

SEQ ID NO: 1749 - DNA, 244 bp, Homo sapiens
  misc_feature 87: n = A,T,C or G
aaaaggccccattatctgacaaaatagatggtgaacatgcactatcccaggatatctattattatccaaagaagtgtttctcaaagngtggtccatggtactggtccatgaattggttgctaccagtcaatgaagagataaattacttgcatcagagtgtaaatcaatacattgctttagctattaataaaattttgctaaaaaatcaaatcctgtcattgacctaaaaagtatctctagattt

SEQ ID NO: 1750 - DNA, 289 bp, Homo sapiens
  misc_feature 247: n = A,T,C or G
aggccagcctccaccacgcacggcgaaaggagtgaactagctgggacacacacacgtgtgaatgcatgcaagcattcactgcatcttctccgtggactccctaccgctcttccatagccccccctttcagcctcactgtttctcgtgtgagcctatctgcttgggcagtccactcgggagggggtcatggagccaggactccctctaaataggaatggaaaggaccctgcagatatttttatcctanttgtgaaaacaaggtgcctctgattctctatatccatcacag

SEQ ID NO: 1751 - DNA, 594 bp, Homo sapiens
  misc_feature 558: n = A,T,C or G
ctggttattaatcacaagtcctggaaatggtctaatgaccgtgaatttgataaactcggcagagtctaagatccttctcatggagctgatttccaggtagctgggggctttgaaggacacccccgggggcatgccatcaaccaccacacagccagggttaattgtgattttcctgtagggaactttcacaggaaaacccataccaatagcttcaccaaatttccgactaaagaggtcattcacttgttctcttagctgtctagctttttcaactttcgagagtctttcattatcatcatctggaattgtcacctgaatgatgttaaggtcttcaacacctgatgcagtagtattaacattgggtgatgaatttatttttctgggagggctcttagaggaggtgctctccttaatcgccgtctcaaacatttcgggctttttaatgatgaacttaattttggctttgtttctgagtatcttctccagcctcggaatgccaaaagtcgatggtcttcggaatggcacaccctcaggtaagccttccacataaaagtcttncgggaaagactcaaataacgcgaacggcaccttcac

SEQ ID NO: 1752 - DNA, 311 bp, Homo sapiens
ctgaaggtttcatggctcccaaggcttggaccgtgctgacagaatactacaaatccttggagaaagcttaggctgttaacccagtcactccacctttgacacattactagtaacaagaggggaccacatagtctctgttggcatttctttgtggtgtctgtctggacatgcttcctaaaaacagaccattttccttaacttgcatcagttttggtctgccttatgagttctgttttgaacaagtgtaacacactgatggttttaatgtatcttttccacttattatagttatattcctacaatacaatttt

SEQ ID NO: 1753 - DNA, 587 bp, Homo sapiens
  misc_feature 552, 561: n = A,T,C or G
ctgtccattatacaccgtcacgttgatccctgcctccagcaactcgtccacaatgctaatgactggcttcatgaagtcctcctccatgttcacaaagacgttggtagcctggcctccccaggattgatcctcaggaataattttgagcttctttctgatggggccattcatgagctggcttaaggcatctcgttgtaggtgtctcacgtggcgctgacaaagacaaactaggtggctctgtgtgaattctagactcgactccattgtagacgtgggagtgcttttagttaagatgttatagaagttcaccccatctgtgttctgttcaatgatcatttctgctttcccccacagctctgtggcctctctgtagagccccttatttacggcattcagtacttgctctgcaaccttagacacctctgccagacctttgtcttcgagaagagacatgctgtacaggtaaggtccccaggagagcaccgaatcaacaggggagatccaggaatcacccaaggcaacccccgcaaagttgcacttgatggtccctcnctgaatggncttataaagctctagaccaatgccag

SEQ ID NO: 1754 - DNA, 564 bp, Homo sapiens
  misc_feature 409: n = A,T,C or G
cctctctccttggcttgcaggtggcaccttctcactatgtcctcacatggccttttctctgtggagagggacagagagcatgagcaggctctggtgtctcctcttcttataaagacactaatatcaccatattagggcttaaacctatgacctcatttaaccttaaccccttaaaggtcccatctccaaaaacagtcacatagcaggctactgcttcaacatatgcatttgggggaggggacaccattcagttcttaacagggtggtcaccgcaaacatggaaagtcagagccttctccccttcagaattcccgcccccacccagggatggggaagaggagcagagaggtatgggaagcagacacggagagtggcaggtaccatgctggggtggctcaggagtgcttcngaggacatatggaactggcagggctcagtgcagggaggcggaggccctgggagagccgtgtcctgagaagggcctgggctacaaccctgggcaagttacttcacctctgagcctccgatgctctgtgaaatggaaggaatgtgcttgcctgtcag

SEQ ID NO: 1755 - DNA, 214 bp, Homo sapiens
aaatgtgatgttttgagcatcaaaaagctactatctaaaaggattagtctcccagtgttcttggtaaatggggaaggttaggaaggaggcaatgatccaatgaatatagaagaactggccgattcacaggaaacttgctttggataaggtgagtcaatgggtgatattgtgcaggcagggagggaaatttctttgtacaaattcatgtccctgg

SEQ ID NO: 1756 - DNA, 225 bp, Homo sapiens
  misc_feature 8, 9, 40, 41, 76, 88, 89, 91, 100, 143, 181, 188, 197, 201,202, 217: n = A,T,C or G
aaaattannacatacatggtcaggcagcttctgtccatanntaaactattccttttcagtctgagtaatatgcggnttgttcttaatnncncacattaanaatttatttagattggtgaaactatctttataaaaaaaaaatncgaacatgaatgcaaacttaccaaacagagcccactanattgatnaagttaatnccannatagtttgccatganctgggtgg

SEQ ID NO: 1757 - DNA, 282 bp, Homo sapiens
ttgcagcctgcgatgacacagcgaatctatgacaagtttatagctcagttgcagacatctatccgggaggaaatctctgacatcaaagaggaggggaacctagaagctgtcttgaatgccttggataaaattgtggaagaaggcaaagtccgcaaagagccagcctggcgccccagcgggatcccagagaaggatctgcacagtgttatggcaccctacttcctgcagcaacgggacaccctgcggcgccatgtgcagaaacaggaggccgagaaccagcag

SEQ ID NO: 1758 - DNA, 473 bp, Homo sapiens
ctgaaacagcttttcaagctctctctcctcgtcaaggatcatgagaggcactccactcaaggggaggtgcgcaatctggtgctcttcaggcaggtcaaaactctcaaagtctagaggattgaagggaaagaatttttctatttctggataggcatcatctgaggcaggaacagagctttttgctttaacagtcttctcagtcatctttttggcagaaaagcttggctgtttttgtttgaggggtcccttggtctttacagacttttctgtagctctgttgacagttcccaaagcctttctagtagctttaggtaaggctggtggggcatcgaacgttttgccaaaacgtggtgttgaaacttgagatctcccatctaaggctttgattgaaggtccagaccccagcttcagcccatccttagcaaccacacgggtgcctggttctccattttccttatcgacatagatcagag

SEQ ID NO: 1759 - DNA, 187 bp, Homo sapiens
aaacttcgccatgatcgtgtcttctgcactcatgatatggaaaggcttgatcgtgctcacaggcagtgagagccccatcgtggtggtgctgagtggcagtatggagccggcctttcacagaggagacctcctgttcctcacaaatttccgggaagacccaatcagagctggtgaaatagttgttttt

SEQ ID NO: 1760 - DNA, 564 bp, Homo sapiens
cctctctccttggcttgcaggtggcaccttctcactatgtcctcacacggccttttctctgtggagagggacagagagcatgagcaggctctggtgtctcctcttcttataaagacactaatatcaccatattagggcttaaacctatgacctcatttaaccttaaccccttaaaggtcccatctccaaaaacagtcacatagcaggctactgcttcaacatatgcatttgggggaggggacaccattcagttcttaacagggtggtcaccgcaaacatggaaagtcagagccttctccccttcagaattcccgcccccacccagggatggggaagaggagcagagaggtatgggaagcagacacggagagtggcaggtaccatgctggggtggctcaggagtgcttcggaggacatatggaactggcagggctcagtgcagggaggcggaggccctgggagagccgtgtcctgagaagggcctgggctacaaccctgggcaagttacttcacctctgagcctccgatgctctgtgaaatggaaggaatgtgcttgcctgtcag

SEQ ID NO: 1761 - DNA, 413 bp, Homo sapiens
ctgtcttctcatctatcttagcataggagtcctctgctgccttttcaataccgtcgtggtatttctccaaagcagttttcaagtttagaaatatttcctgggacttcagtttctccctttcagcagcatcttttagttgttgaattccaagtttaattttttggatttcttgattaattgtggttactcgttcatagacagcacctcttttttcttgaactttattgcaatcctcaattactgtgcgtttgtattgcttaacatcttcatgcttcttatttattttgaattgtgctgtggcaagtttttccttcttcacaatcatcagtcttttgaacgaattttcttcagtcttcaatttcttcagttctgactcatcactctcaatttggtcctccaagttcaggcttctg

SEQ ID NO: 1762 - DNA, 315 bp, Homo sapiens
ggaaaagaaagagctgaaaatgcagaaagccgaagagttagaacttttggatacaggagaagaaacagcggctccactacagacccagccccaggttcaatgtcctccgaagaatgaagtctttccctggtgatggtcccctgccctgtctttccagcatccactctcccttgtcctcctgggggcatatctcagtcaggcagcggcttcctgatgatggtcgttggggtggttgtcatgtgatgggtcccctccaggttactaaagggtgcatgtcccctgcttgaacactgaagggcaggtggtgggccatgg

SEQ ID NO: 1763 - DNA, 114 bp, Homo sapiens
  misc_feature 16: n = A,T,C or G
cgaccgcctaagagtngcgctgtaagaagcaacaacctctcctcttcgtctccgccatcagctcggcagtcgcgaagcagcaaccatgcgtgagtgcatctccatccacgttgg

SEQ ID NO: 1764 - DNA, 114 bp, Homo sapiens
  misc_feature 25, 33, 38, 53, 62, 71, 81, 83, 93, 102: n = A,T,C or G
ctaatacgactcactatacggctcnagcggccntccgngccgggggctgctcnggttagatngacatgaanaccctacagntnccactgtggnaattgaaantatccctcatgt

SEQ ID NO: 1765 - DNA, 485 bp, Homo sapiens
aaacagtaacaaaacagaaagcaagaatcactgaacactgggtgcagtcagttctaagtccttataataattgccaaaattatttgaatgattcttcaagattaggctgatccctggctaaggtctgtgtaaggcagacaagcgttattgatcatatcaagttccctacaatatcctgtcctcaaaaccggaagcaatgaacatgatcctcttcggttggataaatgaacttcctgtttggcctgcttctaggccctgccagattctcataacatcatatacgtaagtatagttcctcaaagtgactgacatttattttaattttgctttgtttttttttattttctcccccattcctttattttgtgttattcctgactcacttgacactctctgatgcctgagagattcctgtttgggatttaatatccagggctgtgtttacagtaaaaaaagcaggcagtcccttttagtttttccttttt

SEQ ID NO: 1766 - DNA, 389 bp, Homo sapiens
aaaaacaaagtcttcaacttgggtgttgagattggcaaaaggggaagcaagggaaaagccaaggaaagataaaatattcagaagaaagtcaaagttatctgcaattacatgttagaacagattttgcaggttaaaaagatgttgcttaaatatattcataaacctgttgtaagattttcacttatgcagtttcagaaaatttagctgcttaacatatgacagaactgtattttaacaaatgacattaaaagtcaggagagctactcagttaattgataaagtagaggcaacgtgggggagccctccccacgtttattgaagatttgtggctcccccagccccgtttgcctgcatcaggctaacaacctcattcctcccatagagcctgg

SEQ ID NO: 1767 - DNA, 176 bp, Homo sapiens
  misc_feature 16, 20, 21, 35, 119, 125, 133, 142, 165, 169, 176: n = A,T,C or G
tttttcaacgattaanaatnntcattacataactnggtgaaactgaaaaagtatatcatatgggtacacaaggctatttgccagcgtatattaatattttagaaaatattccttttgtnatactnaatatcancatagagcnagaatcatattatcatacttatnatantgttcan

SEQ ID NO: 1768 - DNA, 384 bp, Homo sapiens
aaaagaaatcatggtacttcttagagcaatttgcaaaaggggaaaaaagtcttaggctcactccttggaaataaatatcaagtaaccataaaaatattcagccatttttcagttattcggggagttcaggcatggtcccacgcagagcatcagagttcctctttgaaataacccagctttgccaatgacatctcttttctcaactgcataacctcccaaaacatctgatcaacatcctgctgtttcacaagtccctgctgaatgtatcgaatgtatgtaaaaaagttacatacagaagtgatcctgtatctgcaaaaaggagaaatacaataatagttgcttgagtcccctaatttaattctgtgtttacaggacttactctgg

SEQ ID NO: 1769 - DNA, 111 bp, Homo sapiens
  misc_feature 91: n = A,T,C or G
aaatataaaaaattaaaagttaaaactctagcccttcagtgaaggagacgtaaaatggcgtgggtaacaacaactaccaaaaaaaaaaaanaaaaaaaaaaaaaaaaaaaa

SEQ ID NO: 1770 - DNA, 225 bp, Homo sapiens
ctggctgaaggggccgtggagctcccgccagcccacgattagctgggccttcttcgggccaatgcgctgaagactgcggagatctcgggctgagccttcgttcagcagatccagtattttttggcgcccatgagccagtagctccgggctgatctgtagctcccagcagtcctcagccttctcctcaggctctagggcatccagggactccagctttctcttccg

SEQ ID NO: 1771 - DNA, 223 bp, Homo sapiens
  misc_feature 39: n = A,T,C or G
ggccaagtaaaagctttatttttttaaatgaaaactacnaaaggcggggtgggttgtggcgggggcaagttgtggccctgtaggaccttcggtgactgatgatctaagtttccggaggtttctcagagcctctctggttctttcaatcggggatgtctgagggaccttccgcggcatctatgcgggcatggttactgcctctggtgccccccgcagccgcgcg

SEQ ID NO: 1772 - DNA, 419 bp, Homo sapiens
ccaagtctacaatgtcccaatatcaaggacaaccaccctagcttcttagtgaagacaatgtacagttatccattagatcaagactacacggtctatgagcaataatgtgatttctggacattgcccatgtataatcctcactgatgatttcaagctaaagcaaaccaccttatacagagatctagaatctctttatgttctccagaggaaggtggaagaaaccatgggcaggagtaggaattgagtgataaacaattgggctaatgaagaaaacttctcttattgttcagttcatccagattataacttcaatgggacactttagaccattagacaattgacactggattaaacaaattcacataatgccaaatacacaatgtatttatagcaacgtataatttgcaaagatggacttt

SEQ ID NO: 1773 - DNA, 172 bp, Homo sapiens
  misc_feature 3, 42, 66, 68, 77, 85, 104, 140: n = A,T,C or G
cgngcggctgcggggggcaccagaggcagtataccatgcccncatagatgccgcggaaggtccctnanacatccccnattgaaanaaccattagaggctctganaaacctacggaaacttagatcatcaggtcaccgaanagtcctacagggccacaacatgccccctgcac

SEQ ID NO: 1774 - DNA, 525 bp, Homo sapiens
ccttcactctcccctgaggctgtcctggcccggactgtggggagcacctccaccccccggagcaggtgcacacccaggtaagcaggtccaggggctggggtgggcagggctagcttttggatcctgagtgtcactactctctcctcccagggatgccctggacctaagtgacatcaactcagagcctcctcggggctccttcccctcctttgagcctcggaacctcctcagcctgtttgaggacaccctagacccaacctgagccccagactctgcctctgcacttttaaccttttatcctgtgtctctcccgtcgcccttgaaagctggggcccctcgggaactcccatggtcttctctgcctggccgtgtctaataaaaagtatttgaaccttgggagcacccaagcttgctcatgtggcaacatggcccttcctggtccctttattgatgtcatccagggtcttaacgcccctgaggctgagccctgctgcagaacccacgctcctggccttgggccagcag

SEQ ID NO: 1775 - DNA, 458 bp, Homo sapiens
aaattttctagtcaaattaataagcctttgtattatatgccatcctcctttggaatgatagcggtataattaaaatagaacatttttaacacagaatacttattggtgaagtggtctcttatgtagtcttcttttgacgagaacgttgagattttcgaactttcagaactttctttttttgatgttttttcccattcttttgctttttcttttggctgacctgtttctcccactttttaatcagttccttcacatctgctgaatctgggtttagacatgtttgaactccattcttcagtgtagcaatgatttcaattttctcgcaggaagggcttggggcaaattgtttaaggtctttcaaggattgtaggtggatagtcccttggttggtgctgatgcaggaacagcgaccctttctcactactggggttccttgcactccaatcagaaccagcaag

SEQ ID NO: 1776 - DNA, 461 bp, Homo sapiens
aaagtttcacttccctagcaaaatatcttcagtcaagaaattagtctttgaaaattatgaaaattgttgtgggaaatatttatacaaattattactgataatgcacatatattttgaaacattgtttctagaagcaataaaatataacctatttaggagataacccaaatgatttgtaaaaaaattaacttgtagaaaagggaaggatgttgtgtaaaatcaagtcaattatttgaggtttttataatattgagtacttatgtactaagtcacacccagccagtcaataactgagaaatcaaaataaaataataatttcaaagaattacataaatacagggccttttgagatttttggcaattgtaaacaaaaacgaatggtttttacaattcagtgtaattctacgaatatttatttggcacccatgttaggcactgaggctacacagcagtgaaatagg

SEQ ID NO: 1777 - DNA, 368 bp, Homo sapiens
ccaagttctgctggaggagcactcaagtgtgacgagcagggccactggaccctgcagggctgtggtgtatatagtgcagctttggaggtggaactctattttcacacttttctatggagccttccgagtcccaggttttcacttgaggctgtctgtctggatggcggttttcagacctccattaacatccctacccagcattctgtacttcgggggccttctctcttgttataaaactttttaccaagtgaaacatcgataccacctttgtttccattctcactggtgtaaatactgagtactaactgagaattttgactttgcattctgtcggaatacttgtgttcaataaaaattgaaagaaaaaa

SEQ ID NO: 1778 - DNA, 554 bp, Homo sapiens
  misc_feature 211, 416, 499, 518: n = A,T,C or G
cagttatgcgaaaacatggctgcggccggtttggcccttctttgtaggagagtttcatccgccctgaaatcttcccgatcgttaataactcctcaggtccctgcctgcacagggttttttcttagtttgttgcctaagagtacaccaaatgtgacatcctttcaccaatatagattacttcataccacattgtcaaggaaaggactagaanaattttttgatgacccaaaaaactgggggcaagaaaaagtaaaatctggagcagcatggacctgtcagcaactaaggaacaaaagtaatgaagatttacacaaactttggtatgtcttactgaaagaaagaaacatgcttctaaccctagagcaggaggccaagcggcagagattgccaatgccaagtccagagcggttagatanggtagtagattccatggatgcattagataaagtggtccagggaaagagaagatgccctaaggcttcttcagactggtcaaganagagctagacctggtgctntggagaaagaagacatctttggaaagaatcatctgg

SEQ ID NO: 1779 - DNA, 379 bp, Homo sapiens
  misc_feature 42, 378: n = A,T,C or G
gtcttggctgggcatgacaaccgcgtcagctgcctgggcgtnactgacgatggcatggctgtggcgacagggtcctgggatagcttcctcaagatctggaactaacgccagtagcatgtggatgccatggagactggaagaccattccaacttggacgcgttaccatgagagcatatcctatccaaccgtactaacgtggacaccctacacctcccctcagaacttcaaaagggcaagatcttttttccttcacttattgctgagaccaagagcacaattcccattgagagaaagatctctgtgctgtaaactaaaacaaattgtgcattccttccggggccatcgtctttgtcttcttttttgtcttgaatgaattnt

SEQ ID NO: 1780 - DNA, 222 bp, Homo sapiens
ctggtaattgcagaatccactttgcctgtgtaagtgaaaaatatagactgttatcttgttggccctatgaaattctgcacttttcattatatactctaccttcattaattacttctggcaagatgttctgccttagcactcagttgcattcttttcctttttcttcctgttcattatgctttaattctgaggaccatatgagggtagaatatattatctttt

SEQ ID NO: 1781 - DNA, 292 bp, Homo sapiens
ctgctggagcaagccctgcggaagcacaacgtggctgagccgtgttccatcaaagtccttgacaaggctacggtaccaataataaagctcacagatcaggagactgaagtgaaagttgacatcagctttaacatggagacgggcgtccgggcagcggagttcatcaagaattacatgaagaaatattcattgctgccttacttgattttagtattgaaacagttccttctgcagagggacctgaatgaagtttttacaggtggaattagctcatacagcctaattttaatgg

SEQ ID NO: 1782 - DNA, 381 bp, Homo sapiens
  misc_feature 132: n = A,T,C or G
aaaacctggacctttctggaagggcagcatataaaaacatcagtcccgaggaggggacaacaatactacctcactactacatctgtgatgactggttgttcaaacacaatggagtgtgtaaggtatatgttntataattcataaccatagcctcgatcatcaagaaatactttcgaaatttcattttccttcagaatatcttaagagtgctaaatttttaactgcctttttgtcgagtcaaactgtgggattctgatttgtattaaaattgtaagctcctcactggtatactatcatcctggaggggtgttgtatggctgagcaagagagagagagaatgagagagagactgtgtgtgtgtgtgtgtgtgtgtgtgtgcac

SEQ ID NO: 1783 - DNA, 127 bp, Homo sapiens
aaatatctatgtcacagcaaacaggtggcaattcaacatccagggtcgacagaatgcttgaaggagactgcaacagattggattcccatggtggagagggcatcttcacaggtgaaggggggcccag

SEQ ID NO: 1784 - DNA, 259 bp, Homo sapiens
agcccaatgttcctgttggtatagactatgtgatacctaaaacagggttttactgtaagctgtgttcactcttttatacaaatgaagaagttgcaaagaatactcattgcagcagccttcctcattatcagaaattaaagaaatttctgaataaattggcagaagaacgcagacagaagaaggaaacttaagatgtgcaaggagatttaatgatttcaaagaaaataatggttctttgtttttaatgttaacctttttt

SEQ ID NO: 1785 - DNA, 400 bp, Homo sapiens
ctggtacttgacagagaggatggcgctgtcgaccatagtctcccagaggaagcagataaagcggaaggctccccgtggctttctaaagcgagtcttcaagcgaaagaagcctcaacttcgtctggagaaaagtggtgacttattggtccatctgaactgtttactgtttgttcatcgattagcagaagagtccaggacaaacgcttgtgcgagtaaatgtagagtcattaacaaggagcatgtactggccgcagcaaaggtaattctaaagaagagcagaggttagaagtcaaagaacatattcttgaaagttatgatgcattcttttgggtggtaacagatcataaagacattttttacacatcagttaatatgggattattaaatattggctataaaa

SEQ ID NO: 1786 - DNA, 372 bp, Homo sapiens
  misc_feature 239: n = A,T,C or G
aaatgttctcatcagtttcttgccatgttgttaactatacaacctggctaaagatgaatatttttctactggtattttaatttttgacctaaatgtttaagcattcggaatgagaaaactatacagatttgagaaatgatgctaaatttatagttttcagtaacttaaaaagctaacatgagagcatgccaaaatttgctaagtcttacaaagatcaagggctgtccgcaacagggaanaacagttttgaaaatttatgaactatcttatttttaggtaggttttgaaagctttttgtctaagtgaattcttatgccttggtcagagtaataactgaaggagttgcttatcttggctttcgagtctgagttt

SEQ ID NO: 1787 - DNA, 86 bp, Homo sapiens
  misc_feature 22: n = A,T,C or G
atgatgattactttcacatcgnaatccaacctgaagagtactttgttctccaatgttgctgtcaacattcagccatttatccttat

SEQ ID NO: 1788 - DNA, 354 bp, Homo sapiens
ccttgaaaatccgcctgcaagcctaccacactcaaaccaccccactcatagagtactacaggaaacgggggatccactccgccatcgatgcatcccagacccccgatgtcgtgttcgcaagcatcctagcagccttctccaaagccacatcctagtatcagaaggccaggcgagactgcaacactgctcatcaccccgcggcgtgatccctgctcttaggtgctgggcagaggggaagggtggtcagggtgaggatggtgagggagggctggtgaggggctcagaggaatacttggaacaacagcagtgttattgtagtgtggcagtttcttttatacataggtgagagttttt

SEQ ID NO: 1789 - DNA, 651 bp, Homo sapiens
taaagggcttcttgcttttttgaatacaaaacatgatctattgtaataaaaaggtaagacattgattttacaaaattatatttccaaatacagataaaaaaatcttgaacagttaattcagattttattgatctaaaatgtgcaaaatatctgataatacttaagtttattaaattcattgtacataggctgatatcatcccatacaaaaaaatgctcagtatcttgttaagattcaaaatagtgtttaattatctgagcttaagatttattgaactactatccaaataacaacaaaagtccatattgtaaaagaaaaaagtaaaactaaaaattttctgattattaattgacttgaaattcattcccattaaaacataaaactatagccaatatccatttgaaaagtgaagaaaaactggaagtccccatgataaatacaccaattccaaataaaaaattaaaatcaaattttgctattcaaaacacacatgatcttttaagttattcaggtttaatagatttactaaggatagagttcatagagcatgtatttggtacttctgtttagactcaggttttgcaaagtccccaagagaaggtgagaaggtaaaataaacataaaattgggatccttctctcccaccacacc

SEQ ID NO: 1790 - DNA, 388 bp, Homo sapiens
aaatcatgtttaacacagtgtacacaagtcagtccaacagttagtgttaattactaataatatatgaaaaccctgccaacacaattgctgctacatcaccaatataattattaaccactgtcggaaaaacacacataaattcaggtaagactaaaagctgtctcacaaaaagaaaaaagaaatccaatggatccactaatgctatcaaaagggacatgcaggaatgtaacatgacatttttagaaatgtgtgtttctaaaaagaaaaaaaaatacactaaaatgccagtggactataattcattcaaaacatctttagtgttccttcccaaagatcttgatctgctcagtaattgcttcacaagatctatcacagccatcttttggag

SEQ ID NO: 1791 - DNA, 2442 bp, Homo sapiens
cgggagcttgaaggacacaagaatgggaggaaaggcggactctcaggaacttcattcttcacgtggtttatggtgattgcattgctgggcgtctggacatctgtagctgtcgtttggtttgatcttgttgactatgaggaagttctaggaaaactaggaatctatgatgctgatggtgatggagattttgatgtggatgatgccaaagttttattaggacttaaagagagatctacttcagagccagcagtcccgccagaagaggctgagccacacactgagcccgaggagcaggttcctgtggaggcagaaccccagaatatcgaagatgaagcaaaagaacaaattcagtcccttctccatgaaatggtacacgcagaacatgttgagggagaagacttgcaacaagaagatggacccacaggagaaccacaacaagaggatgatgagtttcttatggcgactgatgtagatgatagatttgagaccctggaacttgaagtatctcatgaagaaaccgagcatagttaccacgtggaagagacagtttcacaagactgtaatcaggatatggaagagatgatgtctgagcaggaaaatccagattccagtgaaccagtagtagaagatgaaagattgcaccatgatacagatgatgtaacataccaagtctatgaggaacaagcagtatatgaacctctagaaaatgaagggatagaaatcacagaagtaactgtcccccctgaggataatcctgtagaagattcacaggtaattgtagaagaagtaagcatttttcctgtggaagaacagcaggaagtaccaccagatacttaaagcttcaaaaagactgcccctaccaccacaggaggaccagcctaaccatacgctccaaaagatggctgtgatagatcttgtgaagcaattactgagcagatcaagatctttgggaaggaacactaaagatgttttgaatgaattatagtccactggcattttagtgtatttttttttctttttagaaacacacatttctaaaaatgtcatgttacattcctgcatgtcccttttgatagcattagtggatccattggatttcttttttctttttgtgagacagcttttagtcttacctgaatttatgtgtgtttttccgacagtggttaataattatattggtgatgtagcagcaattgtgttggcagggttttcatatattattagtaattaacactaactgttggactgacttgtgtacactgtgttaaacatgatttaaaagctattaagagtactttgtgttagcactcttaaaaacgctaacagagatcatcattagctgtgaagatttgagttgtatatacctgcactgatattcttatcaaaaatttctacattagctttaagtgttcagattaacacttttgaaacctttgtagcttttagctgattaattagaaaaattaatatttcagtgaaagttttaaattatcatttatttatttttttaaatgagaggggaaagctgaaattccttgttaagacacaaggaaaaagaatggccctactattatcatgcaaaaatgctttgttggcacctcagattaatcatataatagctatagtctcttcagcatttgtttaaattttagaaaacctgtataaattactggtgcataacttaaagattattctgcctttggctaattgagtaattcccctccagcactagagaccgctcagtgctcttactagatgaactcagtaacgccttgagctgggttgattgaggatgtgtgaaaaagctcacagagcccgatgcctgctgctatttcacggcaatgagcctttttctttctacactgaagattttcttcttatttaatgtggtttattttgggctcagaaataattgctctgttgaaaataatcctttgtcagaaaagaaggtagctaccacatcattttgaaaggaccatgagcaactataagcaaagccataagaagtggtttgatcgatatattaggggtagctcttgattttgttaacattaagataaggtgactttttccccctgcttttaggattaaaatcaaagatacttctatatttttatcactatagatcatagttattatacaatgtagtgagtcctgcatgggtactcgatgtgtaatgaaacctgaaataataataagataataagaaaagcaataattttctaaagctgtgctgtcggtgatacagagatgatactcaaattataataaaactcttcattttgtgaattatagaagctactttttataaagccatatttttttagggaaactaaggagtgacatagaactgatgaatgagtaaaagtaagttttgctggatttttgtagaactctggacgttgaggattcattatgctgtggttaactttaaatattttt

SEQ ID NO: 1792 - DNA, 2279 bp, Homo sapiens
cccagctaatcttttatcttctcaccgaagcttagtacagcgggttgaaacaatttctctaggtgagcacccctgtgacagaggagaacaagtaactctcttcctcttcaatgattgcctagagatagcaagaaaacggcacaaggttattggcacttttaggagtcctcatggccaaacccgacccccagcttctcttaagcatattcacctaatgcctctttctcagattaagaaggtattggacataagagagacagaagattgccataatgcttttgccttgcttgtgaggccaccaacagagcaggcaaatgtgctactcagtttccagatgacatcagatgaacttccaaaagaaaactggctaaagatgctgtgtcgacatgtagctaacaccatttgtaaagcagatgctgagaatcttatttatactgctgatccagaatcctttgaagtaaatacaaaagatatggacagtacattgagtagagcatcaagagcaataaaaaagacttcaaaaaaggttacaagagcattctctttctccaaaactccaaaaagagctcttcgaagggctcttatgacatcccacggctcagtggagggaagaagtccttccagcaatgataagcatgtaatgagtcgtctttctagcacatcatcattagcaattacccattctgtttccacaagcaatgtaattggatttactaagcatgtttatgttcagcgcctaaactctactggtgggcgctctcagtactcctggtttcaatctgtacgtcattctgctttccgagctagtttttcagagatactagaaggaaatactgatttttcaaatttcaaaaaagttctttccaagtcatctttgacatttgtgaagaattaggagatttgccaaccactaatggaaacaagcctcatgaagtttaatggtatcccttctccctcccttgtcagccttccttccttctttgaaaggagaagtcatacgttaagtagatctacaactcatttgatatgaagcgttaccaaaatcttaaattatagaaatgtatagacacctcatactcaaataagaaactgacttaaatggtacttgtaattagcacttggtgaaagctggaaggaagataaataacactaaactatgctatttgatttttcttcttgaaagagtaaggtttacctgttacattttcaagttaattcatgtaaaaaatgatagtgattttgatgtaatttatctcttgtttgaatctgtcattcaaaggccaataatttaagttgctatcagctgatattagtagctttgcaaccctgatagagtaaataaattttatgggcgggtgccaaatactgctgtgaatctatttgtatagtatccatgaatgaatttatggaaatagatatttgtgcagctcaatttatgcagagattaaatgacatcataatactggatgaaaacttgcatagaattctgattaaatagtgggtctgtttcacatgtgcagtttgaagtatttaaataaccactcctttcacagtttattttcttctcaagcgttttcaagatctagcatgtggattttaaaagatttgccctcattaacaagaataacatttaaaggagattgtttcaaaatatttttgcaaattgagataaggacagaaagattgagaaacattgtatattttgcaaaaacaagatgtttgtagctgtttcagagagagtacggtatatttatggtaattttatccactagcaaatcttgatttagtttgatagtgtgtggaattttattttgaaggataagaccatgggaaaattgtggtaaagactgtttgtacccttcatgaaataattctgaagttgccatcagttttactaatcttctgtgaaatgcatagatatgcgcatgttcaactttttattgtggtcttataattaaatgtaaaattgaaaattcatttgctgtttcaaagtgtgatatctttcacaatagcctttttatagtcagtaattcagaataatcaagttcatatggataaatgcatttttatttcctatttctttagggagtgctacaaatgtttgtcacttaaatttcaagtttctgttttaatagttaactgactatagattgttttctatgccatgtatgtgccacttctgagagtagtaaatgactctttgctacattttaaaagcaattgtattagtaagaactttgtaaataaatacctaaaacccaagtgttaaaaaaaaaaaa

SEQ ID NO: 1793 - DNA, 1904 bp, Homo sapiens
gggaatttgaattggaatttacttccagctgcactcatgcaagaatttgtgatgtatactaaaaaataaaaaaaggctcattcaggagagccttgtactcagcaagagtggctaacattagagcatacagactatgtgattgtataaggcatggagagttaaacaacctccagtcagctgcctgtttgaataccactgacttgttaagaatgatcttgcttttagattttaccatattcaaacttattaggtgagccttatatagcatatatacctggctgctattgtggggtttgggaacatgaggggtggggtgaactgttgttgttttaggtttcagtcagacagacatccctgtgcctcagttcccagaagcacagcaggcctctaggagcatccgtgggaacggcgcagtcctgacatcaccaactctcctgctcaggctcatcccatatacagaggtcaaagggtggggtttgatatcgggggaaggaatgagaaagtagaagcaatgtcacttcagtgccactgttgactagtctttggtgcttatgtcagtatttgttttatttcctgatttttttaaagttggcaaaactacatatttttatcttgatgaaggcagtgggagggtggaacaaaaacaagccattactgctatttctagttcatttactggagactgtcccttaatagctaatgtagaataaatttgaaacatagacctagatgacaaaaagaatgggaatagaaatgaatctcaggatttgaacaaacagaagacgtttatgctgtgttgatgcccagttctacaactgctattacatttgtcattctgtctccccttttcccctaattcttttatgtatgtatgtatacagtttgaggaaatgtgcatctatggtcagtcctttttaaaagacttaatgaatttattactcttttgcaaaaaatatacccactgcttatatgggcatacaaatgctaccctattttaaatgtaggtggcgtatgtgttcgtgttttaatgtattcagagccattgggcaataagcagtccagaacattgaaaactcaagcaggtaaagcacctaacacccttagtttctagaattactttaaaaaacttttatattgctgcatcttccacagttctttgggtagtctctgaacttaaaatttgtaggagttgtagactacctaaatttttaagttatggtatttgttcataggttgtaggggtaggtaaagaaggaaacagacaagaaaatggcttcttgaggtggcagctgctgagtggctaaatcttaccactttctttctactttttttggaaattttcccagcttagcatgaacatggatcatacagtgtttgattttatgtgattgagatttttgttttttatttttggagggaaggtcttggagaaacattaaaaagttggtgtatgtgcaaaaatacgaaatgttaaacaaaggaattttttcttatttaatctgaatggtaagcaagaactttttctatatacccttctgctgcagcagacaactaaactggtaggtggcagcagaggaaggaattcttcagattgatggctactgacttaaagtctgcataggagaagagatagagcatgacataccaagtgaagcaagggggacaaaaatggaaacaggactaagattcctgcattttgactctaaatggttcttttgaagtaaccagtgatcttttttgcttaccctcatcaacagaatggatgaagatagatttgactgtgtgctttttcaagtggagaatatgaatatacagaacaagaaagcaataactccaacctgtttgattccgtctgttttctaaataaagacactatgcgctggaaataaaaaaaaaaaaaaaaa

SEQ ID NO: 1794 - DNA, 2881 bp, Homo sapiens
acagaagtgctagaagccagtgctcgtgaactaaggagaaaaagaacagacaagggaacagcctggacatggcatcagagatccacatgacaggcccaatgtgcctcattgagaacactaatgggcgactgatggcgaatccagaagctctgaagatcctttctgccattacacagcctatggtggtggtggcaattgtgggcctctaccgcacaggcaaatcctacctgatgaacaagctggctggaaagaaaaagggcttctctctgggctccacggtgcagtctcacactaaaggaatctggatgtggtgtgtgccccaccccaagaagccaggccacatcctagttctgctggacaccgagggtctgggagatgtagagaagggtgacaaccagaatgactcctggatcttcgccctggccgtcctcctgagcagcaccttcgtgtacaatagcataggaaccatcaaccagcaggctatggaccaactgtactatgtgacagagctgacacatagaatccgatcaaaatcctcacctgatgagaatgagaatgaggttgaggattcagctgactttgtgagcttcttcccagactttgtgtggacactgagagatttctccctggacttggaagcagatggacaacccctcacaccagatgagtacctgacatactccctgaagctgaagaaaggtaccagtcaaaaagatgaaacttttaacctgcccagactctgtatccggaaattcttcccaaagaaaaaatgctttgtctttgatcggcccgttcaccgcaggaagcttgcccagctcgagaaactacaagatgaagagctggaccccgaatttgtgcaacaagtagcagacttctgttcctacatctttagtaattccaaaactaaaactctttcaggaggcatccaggtcaacgggcctcgtctagagagcctggtgctgacctacgtcaatgccatcagcagtggggatctgccgtgcatggagaacgcagtcctggccttggcccagatagagaactcagctgcagtgcaaaaggctattgcccactatgaacagcagatgggccagaaggtgcagctgcccacagaaagcctccaggagctgctggacctgcacagggacagtgagagagaggccattgaagtcttcatcaggagttccttcaaagatgtggaccatctatttcaaaaggagttagcggcccagctagaaaaaaagcgggatgacttttgtaaacagaatcaggaagcatcatcagatcgttgctcaggtttacttcaggtcattttcagtcctctagaagaagaagtgaaggcgggaatttattcgaaaccagggggctatcgtctctttgttcagaagctacaagacctgaagaaaaagtactatgaggaaccgaggaaggggatacaggctgaagagattctgcagacatacttgaaatccaaggagtctatgactgatgcaattctccagacagaccagactctcacagaaaaagaaaaggagattgaagtggaacgtgtgaaagctgagtctgcacaggcttcagcaaaaatgttgcaggaaatgcaaagaaagaatgagcagatgatggaacagaaggagaggagttatcaggaacacttgaaacaactgactgagaagatggagaacgacagggtccagttgctgaaagagcaagagaggaccctcgctcttaaacttcaggaacaggagcaactactaaaagagggatttcaaaaagaaagcagaataatgaaaaatgagatacaggatctccagacgaaaatgagacgacgaaaggcatgtaccataagctaaagaccagagccttcctgtcacccctaaccaaggcataattgaaacaattttagaatttggaacaagcgtcactacatttgataataattagatcttgcatcataacaccaaaagtttataaaggcatgtggtacaatgatcaaaatcatgttttttcttaaaaaaaaaaaaaagactgtaaattgtgcaacaaagatgcatttacctctgtatcaactcaggaaatctcataagctggtaccactcaggagaagtttattcttccagatgaccagcagtagacaaatggatactgagcagagtcttaggtaaaagtcttgggaaatatttgggcattggtctggccaagtctacaatgtcccaatatcaaggacaaccaccctagcttcttagtgaagacaatgtacagttatccattagatcaagactacacggtctatgagcaataatgtgatttctggacattgcccatgtataatcctcactgatgatttcaagctaaagcaaaccaccttatacagagatctagaatctctttatgttctccagaggaaggtggaagaaaccatgggcaggagtaggaattgagtgataaacaattgggctaatgaagaaaacttctcttattgttcagttcatccagattataacttcaatgggacactttagaccattagacaattgacactggattaaacaaattcacataatgccaaatacacaatgtatttatagcaacgtataatttgcaaagatggactttaaaagatgctgtgtaactaaactgaaataattcaattacttattatttagaatgttaaagcttatgatagtcttttctaattcttaacactcatacttgaaatctttccgagtttccccagaagagaatatgggattttttttgacatttttgacccatttaataatgctcttgtgtttacctagtatatgtagactttgtcttatgtgtcaaaagtcctaggaaagtggttgatgtttcttatagcaattaaaaattatttttgaactga

SEQ ID NO: 1795 - DNA, 422 bp, Homo sapiens
  misc_feature 295, 378, 390: n = A,T,C or G
gttttaaagcctctggacagagcagtatttcgtttaaaactttgtttttcttaaaagcttacagtgtttggctaattctcctcccctttttacaagacgggggccggagggtggacactggtggcaggttaagggatactgtcactttaagaagcctgcagattgaagtgtaaacatggagaaattaggggctgattttttaaactgtgtgagatattaaccagccgccctgttataaaatcaggaaatccaaacagcgatttacaccgattaacaccccctttatatatttttnacaaaaatacactgagaaaataatcaaacgttttcatctctcttgtctttttttgttttttaaaagtgtcaaaagtctacatntaaatataaaanattaaaagttaaactctagcccttcagtgagg

SEQ ID NO: 1796 - DNA, 797 bp, Homo sapiens
agtctctgctcttcccagcctctccggcgcgctccaagggcttcccgtcgggaccatgcgcggcagtgagctcccgctggtcctgctggcgctggtcctctgcctagcgccccgggggcgagcggtcccgctgcctgcgggcggagggaccgtgctgaccaagatgtacccgcgcggcaaccactgggcggtggggcacttaatggggaaaaagagcacaggggagtcttcttctgtttctgagagagggagcctgaagcagcagctgagagagtacatcaggtgggaagaagctgcaaggaatttgctgggtctcatagaagcaaaggagaacagaaaccaccagccacctcaacccaaggccttgggcaatcagcagccttcgtgggattcagaggatagcagcaacttcaaagatgtaggttcaaaaggcaaagttggtagactctctgctccaggttctcaacgtgaaggaaggaacccccagctgaaccagcaatgataatgatggcctctctcaaaagagaaaaacaaaacccctaagagactgagttctgcaagcatcagttctacggatcatcaacaagatttccttgtgcaaaatatttgactattctgtatctttcatccttgactaaattcgtgattttcaagcagcatcttctggtttaaacttgtttgctgtgaacaattgtcgaaaagagtcttccaattaatgcttttttatatctaggctacctgttggttagattcaaggccccgagctgttaccattcacaataaaagcttaaacacat

SEQ ID NO: 1797 - DNA, 4600 bp, Homo sapiens
aatcaactgcttcagggaaaaagaaaaaaaaaaaaaaaagacttgcctgggaggccgcgagaaacttgcattggaagcttcagcaaccagcattcgagaaactcctctctactttagcacggtctccagactcagccgagagacagcaaactgcagcgcggtgagagagcgagagagagggagagagagactctccagcctgggaactataactcctctgcgagaggcggagaactccttccccaaatcttttggggacttttctctctttacccacctccgcccctgcgaggagttgaggggccagttcggccgccgcgcgcgtcttcccgttcggcgtgtgcttggcccggggaaccgggagggcccggcgatcgcgcggcggccgccgcgagggtgtgagcgcgcgtgggcgcccgccgagccgaggccatggtgcagcaaaccaacaatgccgagaacacggaagcgctgctggccggcgagagctcggactcgggcgccggcctcgagctgggaatcgcctcctcccccacgcccggctccaccgcctccacgggcggcaaggccgacgacccgagctggtgcaagaccccgagtgggcacatcaagcgacccatgaacgccttcatggtgtggtcgcagatcgagcggcgcaagatcatggagcagtcgcccgacatgcacaacgccgagatctccaagcggctgggcaaacgctggaagctgctcaaagacagcgacaagatccctttcattcgagaggcggagcggctgcgcctcaagcacatggctgactaccccgactacaagtaccggcccaggaagaaggtgaagtccggcaacgccaactccagctcctcggccgccgcctcctccaagccgggggagaagggagacaaggtcggtggcagtggcgggggcggccatgggggcggcggcggcggcgggagcagcaacgcggggggaggaggcggcggtgcgagtggcggcggcgccaactccaaaccggcgcagaaaaagagctgcggctccaaagtggcgggcggcgcgggcggtggggttagcaaaccgcacgccaagctcatcctggcaggcggcggcggcggcgggaaagcagcggctgccgccgccgcctccttcgccgccgaacaggcgggggccgccgccctgctgcccctgggcgccgccgccgaccaccactcgctgtacaaggcgcggactcccagcgcctcggcctccgcctcctcggcagcctcggcctccgcagcgctcgcggccccgggcaagcacctggcggagaagaaggtgaagcgcgtctacctgttcggcggcctgggcacgtcgtcgtcgcccgtgggcggcgtgggcgcgggagccgaccccagcgaccccctgggcctgtacgaggaggagggcgcgggctgctcgcccgacgcgcccagcctgagcggccgcagcagcgccgcctcgtcccccgccgccggccgctcgcccgccgaccaccgcggctacgccagcctgcgcgccgcctcgcccgccccgtccagcgcgccctcgcacgcgtcctcctcggcctcgtcccactcctcctcttcctcctcctcgggctcctcgtcctccgacgacgagttcgaagacgacctgctcgacctgaaccccagctcaaactttgagagcatgtccctgggcagcttcagttcgtcgtcggcgctcgaccgggacctggattttaacttcgagcccggctccggctcgcacttcgagttcccggactactgcacgcccgaggtgagcgagatgatctcgggagactggctcgagtccagcatctccaacctggttttcacctactgaagggcgcgcaggcagggagaagggccggggggggtaggagaggagaaaaaaaaagtgaaaaaaagaaacgaaaaggacagacgaagagtttaaagagaaaagggaaaaaagaaagaaaaagtaagcagggctggcttcgcccgcgttctcgtcgtcggatcaaggagcgcggcggcgttttggacccgcgctcccatcccccaccttcccgggccggggacccactctgcccagccggagggacgcggaggaggaagagggtagacaggggcgacctgtgattgttgttattgatgttgttgttgatggcaaaaaaaaaaaagcgacttcgagtttgctcccctttgcttgaagagaccccctcccccttccaacgagcttccggacttgtctgcacccccagcaagaaggcgagttagttttctagagacttgaaggagtctcccccttcctgcatcaccaccttggttttgttttattttgcttcttggtcaagaaaggaggggagaacccagcgcacccctccccccctttttttaaacgcgtgatgaagacagaaggctccggggtgacgaatttggccgatggcagatgttttgggggaacgccgggactgagagactccacgcaggcgaattcccgtttggggcttttttttcctccctcttttccccttgccccctctgcagccggaggaggagatgttgaggggaggaggccagccagtgtgaccggcgctaggaaatgacccgagaaccccgttggaagcgcagcagcgggagctaggggcgggggcggaggaggacacgaactggaagggggttcacggtcaaactgaaatggatttgcacgttggggagctggcggcggcggctgctgggcctccgccttcttttctacgtgaaatcagtgaggtgagacttcccagaccccggaggcgtggaggagaggagactgtttgatgtggtacaggggcagtcagtggagggcgagtggtttcggaaaaaaaaaaagaaaaaaagaaaaaaaaagaaaaaaaaaagatttttttcttctcttaatcggaatcgtgatggtgttggattatttcaatggtggggttaatatagcatgttatcctgtctatcttttaaagatttctgtataagactgttgagcagtttttaaaatagtgtaggataatataaaaagcagatagatggcgctatgtttgattcctacaacgaaattatcaccagctttttttcattcttaactctttaaaggattcaaacgcaactcaaatctgtgctggactttaaaaaaacaattcaggaccaaattttttctcagtgtgtgtgtttattccttataggtgtaaatgagaagacgtgtttttttccttcaccgatgctccatcctcgtatttctttttccttgtaaatgtaatcagatgccattttatatgtggacgtatttatactggccaaacatattttttcttttgtccctttttttctttcctttctttttacttcctttatttctttattccttccttttcctttttttcttttttttttctttttttttttttttttttggtagttgttgttacccacgccattttacgtctccttcactgaagggctagagttttaacttttaattttttatatttaaatgtagacttttgacacttttaaaaaacaaaaaaagacaagagagatgaaaacgtttgattattttctcagtgtatttttgtaaaaaatatataaagggggtgttaatcggtgtaaatcgctgtttggatttcctgattttataacagggcggctggttaatatctcacacagtttaaaaaatcagcccctaatttctccatgtttacacttcaatctgcaggcttcttaaagtgacagtatcccttaacctgccaccagtgtccaccctccggcccccgtcttgtaaaaaggggaggagaattagccaaacactgtaagcttttaagaaaaacaaagttttaaacgaaatactgctctgtccagaggctttaaaactggtgcaattacagcaaaaagggattctgtagctttaacttgtaaaccacatcttttttgcactttttttataagcaaaaacgtgccgtttaaaccactggatctatctaaatgccgatttgagttcgcgacactatgtactgcgtttttcattcttgtatttgactatttaatcctttctacttgtcgctaaatataattgttttagtcttatggcatgatgatagcatatgtgttcaggtttatagctgttgtgtttaaaaattgaaaaaagtggaaaacatctttgtacatttaagtctgtattataataagcaaaaagattgtgtgtatgtatgtttaatataacatgacaggcactaggacgtctgcctttttaaggcagttccgttaagggtttttgtttttaaacttttttttgccatccatcctgtgcaatatgccgtgtagaatatttgtcttaaaattcaaggccacaaaaacaatgtttgggggaaaaaaaagaaaaaatcatgccagctaatcatgtcaagttcactgcctgtcagattgttgatatataccttctgtaaataactttttttgagaaggaaataaaatcagctggaactgaaccctaaatcttgacttttgtcgttattatgcccaatgcctaagattggaaaggccctacagtatctggacactacacaatctgccttagc

SEQ ID NO: 1798 - DNA, 1635 bp, Homo sapiens
cccgagacccggcgcaagagagcgcagccttagtaggagaggaacgcgagacgcggcagagcgcgttcagcactgacttttgctgctgcttctgcttttttttttcttagaaacaagaaggcgccagcggcagcctcacacgcgagcgccacgcgaggctcccgaagccaacccgcgaagggaggaggggagggaggaggaggcggcgtgcagggaggagaaaaagcattttcaccttttttgctcccactctaagaagtctcccggggattttgtatatattttttaacttccgtcagggctcccgcttcatatttccttttctttccctctctgttcctgcacccaagttctctctgtgtccccctcgcgggccccgcacctcgcgtcccggatcgctctgattccgcgactccttggccgccgctgcgcatggaaagctctgccaagatggagagcggcggcgccggccagcagccccagccgcagccccagcagcccttcctgccgcccgcagcctgtttctttgccacggccgcagccgcggcggccgcagccgccgcagcggcagcgcagagcgcgcagcagcagcagcagcagcagcagcagcagcagcagcagcaggcgccgcagctgagaccggcggccgacggccagccctcagggggcggtcacaagtcagcgcccaagcaagtcaagcgacagcgctcgtcttcgcccgaactgatgcgctgcaaacgccggctcaacttcagcggctttggctacagcctgccgcagcagcagccggccgccgtggcgcgccgcaacgagcgcgagcgcaaccgcgtcaagttggtcaacctgggctttgccacccttcgggagcacgtccccaacggcgcggccaacaagaagatgagtaaggtggagacactgcgctcggcggtcgagtacatccgcgcgctgcagcagctgctggacgagcatgacgcggtgagcgccgccttccaggcaggcgtcctgtcgcccaccatctcccccaactactccaacgacttgaactccatggccggctcgccggtctcatcctactcgtcggacgagggctcttacgacccgctcagccccgaggagcaggagcttctcgacttcaccaactggttctgaggggctcggcctggtcaggccctggtgcgaatggactttggaagcagggtgatcgcacaacctgcatctttagtgctttcttgtcagtggcgttgggagggggagaaaaggaaaagaaaaaaaaagaagaagaagaagaaaagagaagaagaaaaaaacgaaaacagtcaaccaaccccatcgccaactaagcgaggcatgcctgagagacatggctttcagaaaacgggaagcgctcagaacagtatctttgcactccaatcattcacggagatatgaagagcaactgggacctgagtcaatgcgcaaaatgcagcttgtgtgcaaaagcagtgggctcctggcagaagggagcagcacacgcgttatagtaactcccatcacctctaacacgcacagctgaaagttcttgctcgggtcccttcacctccccgccctttcttagagtgcagttcttagccctctagaaacgagttggtgtctttc

SEQ ID NO: 1799 - DNA, 2036 bp, Homo sapiens
tttcctctttctctaagagtctctctctccctttccctctctctccccccaatctgtctttctagcatgttgccctttttcaaccacatttgtgtttcaggtgtagagaggagagagagtgaacagggagcggggcttttgtctgttggtctccctggactgaagagagggagaatagaagcccaagactaagattctcaaaatggtttattacccagaactctttgtctgggtcagtcaagaaccatttccaaacaaggacatggagggaaggcttcctaagggaagacttcctgtcccaaaggaagtgaaccgcaagaagaacgatgagacaaacgctgcctccctgactccactgggcagcagtgaactccgctccccaagaatcagttacctccactttttttaatcgtaacacctccatttgtattacatatggtgtatgggtattgatgaggtcatggtatcatatatgggatttttttctgtgtaaatcatcaagtataagaagaaactatgggactctgagccttgctttagagaatttacagtggacaaataggtgtcatcaaaccagtttttaatcattctgactcaagtgaaaacgctcagaatttcacactgtgaatccacgtttacaacccttacaggtgggccttcaggcctggttcgctacaacaatgtcttccacaactcaaactcccaccgcgctcacacaaccggtccactcctgccttttcactcacacagctcccgactgcttcttgcagaggctgagagtccccccccccacctttttttttcatttagatgtaacaaacctagtagtttatgttcatcaattgtctgtatatctctatattttatccatgtactcttttgatgtatagaagtagtttgaaactcattgtttccttgtggtaagtgaccgagatgctgccacaggacctgagacactgatgaatggtgctattttggactttcaacatgctccttggcgaggtagctctgatggagttattttttatttccatgttctaagaaggtgttggtactctgtttccctgaatgttgttctctagactggattgacttgttttccttgtgtcttcagtgtggctttcttcctcagtgttgtaggttgagcgaatgctaccagagtgtgagagaccattgtctcgttggctggcgctcacggacatgcagtcacggtagcgggagcaatcacaaaactgtaatttacttaccaaatctcttcctttccgtagcctcgcctgcctgacttagagaaagaaaagcaataattttacaggcattttgaggtgtctctttgggttctttctgtttgaaaggatatttgtcgaaaaaaagagcaaaaccgttttaaataaactccccctggaaaaaaacccaaaacactggcatctgagtaggaatatgaaaatgacaccttttccaaatattaaattggaaaacaaggtctacaaaatcatgatacttttttaaaaggcagagcattcttttttcggcaattttgataagcaaggtgtagatttacatttttgtccttgctcccaacgaaatggataaacaaaaataaattaccatctactcatggaatgttgttgtgttagccagtctgaaagcccaccttaatttttatataactgtctttagctcttcttttgacagggcaggccttgttctgaactgtttcgcttctgactgttaaacaccgatgacgcatgcactgcacttcttcgttttcttcttgctcccccattggcctgagtttcttgtgcattactcctctccctccttcgttagaataggtatatcagctgtgtaaatagagcaagaaaacagtattctgcatctgtggcatttatgtagagttgcagttgtgtactgctgaaaatgcaggcttttgtaacagtgtgatctttactgatgcactcatgacaagtacccaatgtattttagctattttagtagtatttgttcaataaatacgcaagctgtaaggtaactgtctg

SEQ ID NO: 1800 - DNA, 2842 bp, Homo sapiens
gtgggcatccacgggcgccgagcctccgtccgtgtctctatccctcccgggcctttgtcagcgcgcccgctgggagcggggccgagagcgccggttccagtcagacagccccgcaggtcagcggccgggccgagggcgccagagggggccatgtcgtaccagggcaagaagagcatcccgcacatcacgagtgaccgactcctcatcaaaggtggacggatcatcaacgatgaccaatccctttatgctgacgtctacctggaggatggacttatcaaacaaataggagagaacttaatcgttcctggtggagtgaagaccattgaagccaacgggcggatggttattcccggaggtattgatgtcaacacgtacctgcagaagccctcccaggggatgactgcggctgatgacttcttccaagggaccagggcggcactggtgggcgggaccacgatgatcattgaccatgttgttcctgaacctgggtccagcctactgacctctttcgagaagtggcacgaagcagctgacaccaaatcctgctgtgattactccctccacgtggacatcacaagctggtacgatggcgttcgggaggagctggaggtgctggtgcaggacaaaggcgtcaattccttccaagtctacatggcctataaggatgtctaccaaatgtccgacagccagctctatgaagcctttaccttccttaagggcctgggagctgtgatcttggtccatgcagaaaatggagatttgatagctcaggaacaaaagcggatcctggagatgggcatcacgggtcccgagggccatgccctgagcagacctgaagagctggaggccgaggcggtgttccgggccatcaccattgcgggccggatcaactgccctgtgtacatcaccaaggtcatgagcaagagtgcagccgacatcatcgctctggccaggaagaaagggcccctagtttttggagagcccattgccgccagcctggggaccgatggcacccattactggagcaagaactgggccaaggctgcggcgttcgtgacttcccctcccctgagcccggaccctaccacgcccgactacttgacctccctactggcctgtggggacttgcaggtcacaggcagcggccactgtccctacagcactgcccagaaggcggtgggcaaggacaactttaccctgatccccgagggtgtcaacgggatagaggagcggatgaccgtcgtctgggacaaggcggtggctactggcaaaatggatgagaaccagtttgtcgctgtcaccagcaccaatgcagccaagatctttaacctgtacccaaggaaagggcggattgccgtgggctcggatgccgacgtggtcatctgggaccccgacaagttgaagaccataacagccaaaagtcacaagtcggcggtggagtacaacatcttcgagggtatggagtgccacggctccccactagtggtcatcagccagggcaagatcgtctttgaagacggaaacatcaacgtcaacaagggcatgggccgcttcattccgcggaaggcgttcccggagcacctgtaccagcgcgtcaaaatcaggaataaggtttttggattgcaaggggtttccaggggcatgtatgacggtcctgtgtacgaggtaccagctacacccaaatatgcaactcccgctccttcagccaaatcttcgccttctaaacaccagcccccacccatcagaaacctccaccagtccaacttcagcttatcaggtgcccagatagatgacaacaatcccaggcgcaccggccaccgcatcgtggcgccccctggtggccgctccaacatcaccagcctcggttgaacgtggatgcgcggaggagctagcctgaaggattctgggaatcatgtccatcccttttcctgtcagtgtttttgaaacccacagttttagttggtgctgatggagggagggggaagtcgaaggatgctctttcccttttctgtttaggaagaagtggtactagtgtggtgtgtttgcttggaaattccttgccccacagttgtgttcatgctgaatccacctcggagcatggtgttttcattcccccttcctagtgaaccacaggttttagcattgtcttgttctgtcccttccacttctaactccactggctccatgattctctgagtggtggttcctttgcaccctgtagatgttctaggatagttgatgcatgttactaaattacgtatgcaagtctgtgagtgcgtctgaggggacatcgccaaggactgactgagacacgatgccgagacctcaagccctgaggggcagtcccaaaacccttacagtgaagatgtttactcattgcccccacctctggtccacactagaaagaagctcgccccacctccacctgtgagatccgtgaattctcggaatggcaggggaagccttgcactaggttgcagagaagcatcctccacatcctgtgtcagaaaccctggtctccgtggcacttgtaactcaccgtgctgtcttctggtctgtgtgtgttcttcaagccagctctaggcttcaggccgagccaggttcacactcagaaagatgtctccccatccccattcggggctgacgatggggggctgatggctgcccctgcgtggcctgagtcctggtccctctgaggcagttgacggggcagtcagatttttaaagttttgtacaaagttttcctttgtaatcactcccatttttacttaacaaccaacttgttgtggctcttatttctgaattcaaagcttgtgaaaaaataaaagaaaatgaactgccc

SEQ ID NO: 1801 - DNA, 4086 bp, Homo sapiens
aaaatagcgggtactgtggtaccggaggctggcggtaccagtgtggattccaagtgatcatcacaggtacatatagtgatcttccttgtccgtctcgtcccactgggtaccaggcgaatcctactgggtaggtcgggtacgcggcatatgtggggtatgtttggtatccaggtatttgaggtacgaattcagtgtacgttgccaggtgtgcttggtcttctaaatttggaatacataggcgaggatactgattctggatagtaaaattgtttggagctcggcaatcataagaaacttgcagtttccaccccctcttcacctggagaacttgggctccattaggtgcaatcgttggagtaattagcccatcttttacatttcttgccacaaaatctcgaagagctgccatttcaggttcggacagtgaatacacatgtccactgggaatactgtgtgctccaggtatcatttctatgtgagggtcaaccaggcggtgatctgggtagacgtgctcatctactggagtgtacacattctggacatagtaatacctcactggttggtaaactctgtatccatctactggataatagagtggcggttgtggtgctggtggtgggagcgatggtggtattggagaatacatccggcagtggtagcggcagtattcagaatcaaagacgatagatcgagtgctccatgtgatattgggatcatgtgtgctcagccagcgaacccctaggacgacagggaagaatggagactgagtcacatcaaatgacagcacctctcggtgatctcccaggtcaactatcaggtcgtgagtttcgtggacaactgggcccgatgctatggggcgcccatcaattgcttccacaagtattggccagtccttgattcttagaggaattccattttgagcaacatattcgtgatcaatgaagttgccagaagcaccagaatcgatcatggctcggacgaacagggtgtgtctgcccggaagatgaatctggagcatcacttgcaagtgtggagatgaggcatcatcttgtggggaccttattatttctggcccggtcgctgaaggtccctctacagcggggccggggagtttcccgccggcgaagactttgaggccttggcaggacaattgtcagcgtagtgacctcctgttccacagtagaggcacaggttcagctttctgcgtctttctttttcttcctgcgtcaggcgcatgcgggcacctcccaccggctcggttggatctacctggtggtggcttgcaatgtgaggcaacaccagcgcccggggtggcgagcgtggcttgcgagctgcagcagccctggccagccttctctcaatgtgaatgcactgcccaatcagagcagacagcgacttggcgacctcgagcaacattaactgaggaaaaaattgaaaaaggggcgcccttgcttgggggcttcctattgtggaactgttatggaaaggagccccatccattgcttcctccttgaatggcaaatgcctttatgatccctataacttgtcccattatgtttagacccttggtggtcagaagggttctatttagggcagtgtcccctgcccctccttgtcctccaaaaattttgggaggcactgacgtggatgtcatggggtcagcacaggcatcaacatccccagagggatggaaccaagcagcctattgcccaggcattcactaacaggcagcccatcctcagcctcatagctggccggggagaagaaaggctattttgggtcccagatctttttttttttttttgagacagagtctcgctctgtcacccaggctgaagtgcaatggtgcggtctcagctcactacaacctccgcctcccgagttcaagagattctcctgcctcagcctcctgagtagctgggactacaggtgcgtaccaccaagcctggctaatttttgtgcttttagtagggacgtggtttcaccatgttgcccaggttggtctcaaactcctgggctcatgcagtccgcctacctcagcctcccaaagtgctgggattacaggcatgagccactgcacccggtctctgtttacaaatttatcaccagcttcatcccctaaggttataagctccatgagggtgggaagtctgtattgttcacctctgtatcctaagcatctagaacatagcccggcacacagtaggtgctgaagaattgaatctgttaatgtagaaaggatgtttcatctagctgaagtgtcttgtacagaataaactctcaataaatgaactgtggacacatggaagggtgagctagagctctgctcaggggttgagtgctcctcttgtgcccttgtggttgtctggttacctgaactaattggagtgcgatgcagacatagtcatggagtgagacagcagaactttgctgtcttgtttgtgagcccacatcaggggttctagactggctggttgacatggtggccccagcctgtctcttcagcagctcggcttataaaaaataaccacctcctattttggcctctttggccgaattcggccaaagaggcctagcctccgattactaaaccccttgccccacaaacgtccacattgacgagcctctttttagtaactgcttccccgtaattccttcagaggttgctgtacccttcgctgatgtgctgccctcctgtaaaacctccagatgccttcccacgtaatgcccctttcagatgctttaagctgagagcttaaaccacaggtaccatggctgacgcctgccaggtttctgctgcagataatctatgatgggaggggcatattttttacttcattacttatgtaaactcttgttccagaaagctttaatgtgtgtgggagtgttctgggtctattaggtctgtgcgcatgggtgtgggcatttgcctgtgtccaccgggtgggtctcattatgaaatgtatgtttatgtagggctttaatggctgaaaatggcaaagagatgaatagaccacttggccccatgtgtaattgccaggccccttctgtgctcaaatgaggtgtccgagtgaaggtcagcccttcccttctgtatttggggcctatttatgccaccagtaattttataagaaatctgaatagttctcccctttgagtgcatttaactctttagtatcttctctcttacctatttgagcccctctagctacagtctggcttaaatgaaaggggaattatatgcttaagaaaaagtaggacacggttgaggcagtttgctgactgaatacgcgaagaaggacctgatgggctcatatgcaccactgccatcacagtccccatcgtgatgcaagcttatatgattcttgaggtaactctaccagatacttccagatttagaaatgtgtcaaaggaaaaattggtgatactcttctttccctgccagaaacagcccagatctcctcttaagcggaaaagagattgaccttctagcagaggcaaaggtaaactcctgtaagttacttctgttaccaaagggaggggggcggcttttgtgaatgtatgaggagcttttgccagagagatattcggaggaggggtgtgcccatatgcacacatatattttcccgcataaccgtatccaatgctagcatttagaggaaggcatttagccaccaaaagtccatccatctatgctgcttccacagagaaaacattttctctttcctcctcttgaacttacataatatcctcctcccattccaaccttagaatggagtcttctgggggcagctgcaaagcgttctccctaggacagatggagcctccctttcctcatctactctgtgggtggtttcagggcccacgagtcaacatgaggagttgtgctggtggtatgtgtgttggaggctgggctggctgattcacagtgacgaggatgtcaataataacaagaatgagaatgatggtacctaataaagactttttttcccaaaaaaaaaaaaaaaaaaaaaaaaaaaaaaaaaaaaaaaaaaaaaaaaaaaaaaaaaaaaaaaaaaaaaaaaaaaaaaaaaaaaaaaaaaaaaa

SEQ ID NO: 1802 - DNA, 2512 bp, Homo sapiens
gcggggcctctaccggcccgatggagcgcgcgggcgctactagccgcgggggccaagcccctggcttcttactgcggcttcatactgagggccgagccgaggcggcgcgggtgcaggagcaggacttacggcagtgggggctgacagggattcacctacgctcttaccagctggagggagtaaactggctcgcccagcgcttccattgtcagaatggctgtatcctgggagatgagatgggcctggggaagacctgccagactattgctctcttcatttatttggcaggaagattaaatgatgaagggccatttctgattctttgtcccttgtctgttttgagcaactggaaagaagaaatgcagagatttgctccaggtctttcctgtgtaacatatgcaggcgacaaggaggaaagagcctgccttcagcaagacctgaaacaggagtcacgttttcatgtgctactgactacctatgagatttgcttgaaagatgcatcatttctaaaatcattcccttggagtgttcttgttgtggatgaagctcacaggttgaaaaaccaaagctccctgctgcataagaccttgtcagagttctcagtagtcttcagtctcctgttgaccggaactcccatccagaacagcctccaagagctctactccctcctcagttttgtggagcctgatctcttttccaaggaagaggtgggagattttattcaacgctaccaggatattgagaaagaatctgagtcagcaagtgaactgcacaaactcttgcagccatttctgctgaggcgagtgaaagctgaggtagctacagagcttcccaagaagacagaagtagtgatataccatggcatgtcagcattgcagaagaaatactacaaggccattttgatgaaagacctagatgcatttgaaaatgagacggcaaagaaggttaaactacagaacattttgtcccagcttcgaaagtgtgtggatcacccatatttgtttgatggtgtggagccggagccttttgaagttggagaccacctgactgaggctagtgggaagcttcacctgctggataagctactagcattcctgtattctgggggccatcgggttttacttttctcccaaatgacccagatgttggatattctccaagactatatggattacagaggctacagctatgagcgtgtggatggttctgtgagaggagaagagagacacttggccattaagaactttggacagcagcccattttcgtttttctcctgagtactagggcaggtggagttggcatgaacttaacagcagcagatactgtgatttttgttgacagtgactttaatcctcagaatgacttgcaagcagctgccagggctcatcgcattggccaaaacaagtctgttaaagttattcggctgattggtcgagacactgtggaagaaatagtctataggaaagcagcctccaaactgcagctcaccaacatgatcatagaaggaggccattttactctgggagcccagaaacccgctgccgatgctgacctccagttgagtgagatactcaaatttggtttggataaactgctggcctctgaggggagcaccatggatgaaatagacctggagtccatcctgggagaaacaaaagatggccagtgggtctctgatgccttgcctgcagcagaaggagggagcagagatcaagaggaaggaaaaaatcatatgtacttatttgaaggtaaagattattctaaagagcccagtaaggaagacagaaaatcatttgaacaactggtaaaccttcagaaaacccttttggagaaagctagtcaagagggccgatcactccgaaataaaggcagtgttctcatcccaggccttgtggagggatctaccaaaaggaagcgggttctgagtccagaagagctggaggacagacagaagaaaagacaagaagcagctgccaagagaaggagactcatagaggagaagaagaggcaaaaggaagaggctgaacataagaaaaaggtggcctggtgggaatccaacaattaccagtccttctgcctgccctctgaggagagcgagccagaggaccttgagaatggggaagagagctctgctgagctggattaccaagacccagatgctacttccctcaagtacgttagtggtgatgtcacccaccctcaggctggggccgaggatgctctcattgtgcactgcgtagatgactctggccactggggcagaggtggtttatttacagctctggaaaagcgatccgctgagccaagaaaaatatatgagctggctgggaaaatgaaagacctgagtttgggaggtgtccttttatttcctgttgatgataaagaatcaagaaacaaagggcaagatttgttggccttgattgtggctcagcatcgtgatcgttccaatgtcctgtctggcattaagatggcagccctagaagagggcctgaagaagatatttttagcagc

SEQ ID NO: 1803 - DNA, 1014 bp, Homo sapiens
gcagaaatagcctagggagatcaaccccgagatgctgaacaaagtgctgtcccggctgggggtcgccggccagtggcgcttcgtggacgtgctggggctggaagaggagtctctgggctcggtgccagcgcctgcctgcgcgctgctgctgctgtttcccctcacggcccagcatgagaacttcaggaaaaagcagattgaagagctgaagggacaagaagttagtcctaaagtgtacttcatgaagcagaccattgggaattcctgtggcacaatcggacttattcacgcagtggccaataatcaagacaaactgggatttgaggatggatcagttctgaaacagtttctttctgaaacagagaaaatgtcccctgaagacagagcaaaatgctttgaaaagaatgaggccatacaggcagcccatgatgccgtggcacaggaaggccaatgtcgggtagatgacaaggtgaatttccattttattctgtttaacaacgtggatggccacctctatgaacttgatggacgaatgccttttccggtgaaccatggcgccagttcagaggacaccctgctgaaggacgctgccaaggtgtgcagagaattcaccgagcgtgagcaaggagaagtccgcttctctgccgtggctctctgcaaggcagcctaatgctctgtgggagggactttgctgatttcccctcttcccttcaacatgaaaatatataccccccatgcagtctaaaatgcttcagtacttgtgaaacacagctgttcttctgttctgcagacacgccttcccctcagccacacccaggcacttaagcacaagcagagtgcacagctgtccactgggccattgtggtgtgagcttcagatggtgaagcattctccccagtgtatgtcttgtatccgatatctaacgctttaaatggctactttggtttctgtctgtaagttaagaccttggatgtggttatgttgtcctaaagaataaattttgctgatagtagc

SEQ ID NO: 1804 - DNA, 17569 bp, Homo sapiens
ggatcccttgtaaccccatgatgcatgtttatcttcgtactttttatttttgttgttgtttttttcagatggagtttaagcccagctggagtgcgatggtgcaatcccaactcactgcaacctctgcctcccaggttcaagctatttttcctggcttagcctccggagtagctggaattacagatgtgcgcccccatgaccagctaattttttctatttttagtagaaatagggtttcaccatgttagccaggctggtctcgaactcctgacctcaggtgatccgcctgcctcggctcccaaaatctcttgttatttaaagattatctctttgtctggcttttagagttggatgataacacatataggtctgagtctctttgactttatgctatatgcagttctttaagttacttgaatttgtagatttttgtctttaaccaatttgaaaaatttgaatgattttattctccaaataatttctctactaccatgggtttgcacttccccttctgggaatccaatactatcatactggttggcttgaggtgtcccataagtcccttaggacctgttcacatttctttattcttgcttcatgtccttagactcaggaatttcaagtgtgctatccctatgtgtattgattatatcttcatcctgctcaaatttgctattgaaacactctctggtgagttttcattcaggtatatttttagctccaattgttcctttcttttataatttggtaattaatacctatattgtgatttctattttcagatttctgtagttcttaatccatattttcattagcaattttagcatatttaagacagctgtttaaatgcttctctactaatgcctgtgattcttcaggaatgattctacgatatttatttctcctcataatggactgtgaatttctgttcttggtaatgcccttgtcatttatttttgagctgagtcttgctctgtcaccagaatggagtgcaagtggtgccatctcggctcactgcaacctctgcctcctggggtcaagcgattcctctgctttagcctaccgagtagctgggactacaggtgctcaccaccacgtccatctattttttttttggattttagtagagacggggtttcaccatgttggccaggatggtctccatctcctaacctcgtgatctgctcaccttggcctctgggaagtgcgtgggattacaggtgtgaaccaccgtgcctcggcctgtgtatgccttgttattttatttaactgggcatttgaaaaaataaacatcttttttactgtatatagatttgttctatgtcatgacagtcattaacttatatgtgcgcgagttctcatcaagacatcagccctacgtaaaactcaagtccttctagttgtttctgaacatgtacctatgtggactgtgttgccctttatatttccccaaataaccaatggcttttgaattgcttactattatgaaattttgcatcccagttctcctcaatagcttagatggactattgcatgtctctcccctggcctttgcctataacatctgtatgtgtatagtcaccctgaatctctactgagccactccagaaataaataagtttatttcagtcaattttaggtattttctgatgtttccatgagttatatgggaatcttagaatccaccatcttgttgaaattactctgtgaaaaaaattttcaatatctttataatattacatttatgtcaatgataacaatttacctatttttcaatttctgtttgttttatgaaaaaggaaatagaagcaatcagggcactgcaagttgtgcctactccaagatgtgaatcatggatcatgcaaattacaatcatgttttaacctgacctccaaagggagaataaagtaaaaattatcccatgtgaggattattcaccagtttatatgtcattagttaccagttttcctttatgaataatgtttagcaatattataaagtatatctaatagttatcaggttttttggctcgttactttttggtagtaacttataaaactgactggaaaagaccaataaggcactgtttgcatgttacaaattatatccaaagaccaaaagctgttaataagaaatcttccaataaaaccacatcatattttcttttttatttacacccacatcaggattacaactttatcaggactgcaccttgatcaggaaggcctgtttctcttacaaggctaataagaaaggaacaataaatttgctgatgaaaaaaagtcatgtatttaaaaattttaactttaatttttaattgagggcaatattttaaagaaatgctcattagtcattcctttaaattgtgtgtgtgagagagagaaaatgaaatagtcattcaatgctgcagatgcagaggactcatcatcatggcacaacaaaagagctgtgcactagagttctatatctatgtaagtcacaatttgttctacaaatctctttgagtaatttatgtctcatatatagagatctggaatagcaaaaatacttcagaggaaattaatgagtgtatcatgaccacataataatttacttatgaattttcttaggtaagaaacggttgaactggatgcaatttttatcacagcttgtgtaagactgcctctgtccctcctctcacatgccattggttaaccagcagacagtgtgctcaggggcgttgcagctcattgctcttatagcctgtgagggcacggaagaaacatttgctaaccaggccagtgacagaaatggattcgaaataccagtgtgtgaagctgaatgatggtcacttcatgcctgtcctgggatttggcacctatgcgcctgcagaggtaacaattaatattttagtgttgagagttcaaaggagctagagtaagtggaagctgaccaggttgtcaggcttgtgttccatgttactctgcatgactccctttaaacgtcagtctttgtctgcaatgccgtcttgtcacagggtcatctactgctattgtgcactgtttgtcttctgtatgttatttcacagcttgtcagagtctataaaactcagcagaaagaacacggcttgcctgctccctctcttgaagattgattgtaatgggagtggtttctctgtttctttgtatagtcgaacagatatttacgtcttccaagaagatacaattcagaggaatttttatggcaaaagttagtggagacaggtggatgaaatctgtgaggagagtatcactgttctgatgggcggccgtttgagccacccacactgtaatactagacctgcctaaagagaattttcccatgtactattctcacctctgggaaaattaccctgaatataaatatgtccctcattttaagaaaaaaaaaactagaaccaaacaaggaaagtttaaattctttgtctttgttaatatggggtcagatttgtataaaatattgtaacagaaaaatttcttgttctctgacaagaaaattaatggaatatattttattttctagatttagaaatagctaaatactatttctatcactggaagaaaacttgtatctcaagactgtcttgggaatacaatgtgtgtgaataggaactagttatataaaatttgagtctcacatttctcatctataagatataaggagttacaaagggacattttgaagaccattgacaggagtggtttattttgtaatataaattggcatggagaggaagtaaagatgaggataccactgaagctccggccttggtaagcctttgattgcttgcacagcgaagagaagatcaaagatggtatgaggagagggctgtgagacccggtatctagttccttgtaatttcacaggggggagcctctggaatactttcaaggtgggaagatagtttgctttgtttctgtttttgtcatttaaaagatatactgtcaaatctgtatccaaatttgttacataagtcaatcaattgtaaattttactgcaatcatatgtttcctgacagagttgccttgaatttatggagctgaacccattttgctaattcacttactcctgcagcctatttcttagatacacaaatcaatatccttagagtatacatctttacacctagtatgtggttgtgttatgcagacagaatggccaaaacctgggtagaaaagatctaacataatagactgctatccatagatgtgcctatttccaatataaacctgctggcatctgagaaagtggagttctccctgtttcctaactgataagaatggtggctctagctaactgtttgtgtaaactgtggggtttctgtgcacctgctttgcttttggagactggaagatttgtgtctgctaggcagagtgagtcaatgtatccagtcccagacaaaatcttagcaatggagtatgtagagggcatctcttgtagacaacagttcacatacattgacaaaatatgatgctggataaagtcagtgcgctctgtgcaacatggtgggagaggaatcacaggagcttacactgcattccttcataattccttccatgtggctatttccttgtgttaatttcaccatactaaaaataattaagattatgtctgttaactatagttgcgtcctgttgatttttccaaaaaatcactgaaagtgaaattattttggggacacttccaagctagtggtcaagcagtgatttttctgggactgcagaagttcctgctatgcccaacctttattactaaatgggaaagacccagtcagactgggatgggcttatgattctacatacagagctcatccaagaaaggaggaaaagctgatttttgtgaacgttgctgcttgtgcccgaactaactctcaggcacattagtcagaaaatattacgtttggttgctccccgaggttcctaaaagtaaagctctagaggccgtcaaattggcaatagaagccgggtaccaccatattgattctgcacatgtttacaataatgaggagcaggttggactggccatccgaagcaagattgcagatggcagtgtgaagagagaagacatattctacacttcaaaggtactgtgcctatgagcttgtgtgcacatgtatttattccddgtgattgtgtggaggtggcagttctatgactggatcagggtgaattgtgcttatttattacgatttattcacacttactcatgtattaaaactaatatcaaaggcaggaagtgaagatggctttctcatctttgcagtgttccaattcatgccttcaaagatgcctttactctttgagctcagcacagatcaatatggtttaacatagactatagaatgagagataatcttaatcatattatgttatctgttacctcctgggtgagtttcttacatttgttatgattttgagtttccattgtcattttgatcagagagagagagaagcgatataagagagctcagtgagtataaaagagtgatacctacattgttttaaattgcatccagcccaagttaacatattaaaaactgtgtttgcctcctcagtttccaaaccacaaagatacttagtcttgcccattgggctgaatagatgaaataattacacactaatatgagttgtaaaacttaccaaagataattcagataatgggtatgcttatgatttgataagaacttttaccttccgagtaatttcactctttcattgcaatatatgtactgaactatatatccaacatattataaagttcgtcatgatatggcagaaaaaaaggcatgacaagaagagagagaataattttgcctgtggtcattagttttgaagtagtagaaaatgtctaaatattaggtggagcaaactagtaaaattggctcaagttttgattccacaacttcctttctctaacactctgcagctttggagcaattcccatcgaccagagttggtccgaccagccttggaaaggtcactgaaaaatcttcaattggactatgctgacctctatcttattcattttccagtgtctgtaaaggtaggcagcttgtgtgatcaaattaatttcacttttgttctcagcataaatattgttttcatggagatttgaactaagctttttcttaggaggacatagggattttaacatggaagaagagccctaaacataactcctaattcctttctatggaacagaaagcaattttgaatccatacttccgtgattcgatgtctacaagaaaagagagtcgagaatcctcaaaagcctctgcctaaaaaacttgaggaaatgacaatcgatctccttgaaggctactaaggtcttatgaatgattcctgatgcacctcttgggatgttcacagacacagagtttcatgaagctgtggagtccagaaaacctgctgcacatagggtgcacaatgagtttccatttcttgcctcttttcaaggggcaagaactcagtccgggaatgtcttaaactacaaaccttcatgggaaaccttgttgcttctgcttcctctcttttcacactggaggtttgattttttcttagccatgtaattcccddgatatatgtactaactatatatcgaacatatgataaagttgatcatgatatggcagaacaaaaggcatcacaagaagagagagaataatttggcctgtggtcattagttcggaagtagtaaatgtctaaatattaggtggagcaaactagtaccddaaactggctgaagttgggattggccactggttgctctaacctctgcagctttggagcaattcccatcgaccagagttggtccgaccagccttggaaaggtcactgaaaaatcttcaattggactatgctgacctctatcttattcattttccagtgtctgtaaaggtaggcagcttgtgtgatcaaattaatttcacttttgttctcagcataaatattgttttcatggagatttgaactaagctttttcttaggaggacatagggattttaacatggaagaagagccctaaacataactcctaattcctttctatggaacagaaagcaattttgaatccatacttccgtgattgcatgtctacaagaaaagagagtgcagaatcctcaaagcctctgcctcaaaaacttgaggaaatgacaatcatctccttgaaggcacaaggtcttatttatgattcctgatttcacctcttgggatgttcacagacacagagtttcatgaagctgtggtgtcagaaaacctgctgcacatagggtgcacaatgagtttccatcttcttgcctcttttcaagggggcaagaactcagtccgggaatgtcttaaactacaaaccttcatgggaaaccttgttgcttctgcttcctctcttttcacactggacggtttcatttttgcttagccatgaattcttgtgtcattcataacttttgtcttaaggaactgaaaactagtcaggctagttaatgcaaaagggtatattagatatgactaatgggaaatcaaagccagggtacattaagaatttgataaaaactctaaaaatatatcctttctccacccttatctctgctttattacaaaaggctttttaaatatttgttccaacctttttcgttggtggcatttatggctttggagttcactgtcaggcccatgttcattaccgtgagctcctgtgcatctcctaatttccaaactagcctggaaaacgcctccattgaccatgattggttcatggtcctgtgcacggaacatcacatgttcagggagataaagaactctgatagtggcacctgggtaaaaagtacaatccattatatctggatatcaagatcttttgcagttgaagagaggtattgccacagagaaaattataggagcagaagaaagtcaatgaaagtcaatgatgacactccattaggaaccagaaagatggtatttatttacacatataataggtgtaagagattagaggaagcctgtcacctgaagacattccttataccttcatatgtagtacactttgtacataccactctctggagcgctgcatcacctacctcatggaggattagtgtccttaaatgtacctcagagcatggctatgtgtggagaaattgacttgtgacatcactaaactgactgcttctacttcagccaggtgaggaagtgatcccaaaagatgaaaatggaaaaatactatttgacacagtggatctctgtgccacatgggaggtgagtgtttggaggtgagagaacggataagaaagatgaggtaggatacatctgtttcctatcttcttagtacaagtatggaaaatgcaccattggatcaaaaacttaggaactttacaaaggtagtttttgtgagcagcgaggaaaaagaaatgacaggcatacaaaagagagaagtggtggagaagaattgggggtaaggaggactgggatttctttccttgcctgtacattaatctctccactttcctaaggaggaaacagaaattctcactcttgcaatcactatcttcttccccaatttttctgttttattttctcccttttaagaaccacggctagctagtttgattgtcacatctagacagttgttgctttcacagttctatgttacatttatcttgctcttcagtcgactacacaaatgatacctcacaattcctttttccaggccatggagaagtgtaaagatgcaggattggccaagtccatcggggtgtccaacttcaaccacaggctgctggagatgatcctcaacgagccagggctcaagtacgagcctgtctgcaaccaggtgaggcgccctcagcctcctctgcctttctgttcttcatgcccctgctttctgtcctattggccaagtatccattcatttagacccacttatctttgtaaaagagaagattctagagaacaaagcctcttcctagaagggcatggagtcctcttacttgtaccctgcttagaaaagtcttacgaaaaggtgttgtaactttgatgctgaattgtgtgttacatttataggaggtcaattcgatcaagaagtccaaggattgccaattagactcagggaaaggtggattacccctaagctatgaaagatgaccagagagtggacgggctgaaggtgatttggagggaactgtgcatagatatgaagccatgaagagatgaaatgaacagtacataaggagagagtgagagcaagagaagagaaatactagggattcacatgggcttcggatgtctcagtgcctcttggtgtctctgctttcacacttcttgaccaagggcatagatacactaaaaattatctgcagacagtgaaggtcatccatggtagaaagagaaaatgacctgtttatggagatatctgttcacagtggatgaaatccacactgaggaaggttcagcagaacatggagctgacctatgactgcgggctcctagtcggctgctttttggagtctgtcatgcaatcagctgcttaaacacatctattctatgcatggttctctcatagcctagagataattccatcttttccttgagtcctgactggtgattccaggcctccttgatcaaattgactgcccccaaatgttacacacatttcagcattaaaatcactacacctttcccagtaacttacattttttgttataattttgttataatttggtataatgatatggtctgtgataatttaataaaagcattgagaaattaatgtggtttaatactagtagttccccaatttttaatatggccattttcacactttccaaaaatttgataaaaataatactggagacccatgttaccatttatattcaaaattactaacattttgcaatgttatatggagtatatctgcataaatacatataatgtttctagaacctcttcaaggtaaattgtaaagatgacaattgacccctagagacctctcaaagcatgtcacaggaatgaagatattctcccagttccagtgtcattactgtatctaagaacatcatttatagtgcccttatgtcatttggtatccggtccatattttaatttttcattgcttaatcaaaatatcttttgtagctcttctttttttaaccagaattcaattgtttttatattgttgtatttgatatatcagttaacttgtttttcccagttgaaggttcctgtaaattaaaagttagatgtgagtattttattacattggcttaaaactttggggcaagaaaatgtttttatcatgctgtgtttttcaaattgcacgacactagactgcatacaatcacagaatgccccactagtggtgaaggtagttttaaaaacttggttaagctaacagtggtcagatctgttgtttttaactcatgttttctctttaacaattactagtaatctgctgggggataattctcaacagaagaagtcatattcccatgacaaattttcacatatgattgagtatacatcagtgatttgaacttttttctactgcatttctgttttcttctttgttatttcttatttgttatttccttggggtttttacataatcatttacaattttaaccacttgtttaactattcttacctgacatttaattaaaaataatttctcaccaagtaaaaataataaactactattcctctaagtgagagtaaaggtaaaccttcttgccttcaattagcaatgtactgtgaacgaattactgtaatgaccaccatcagagtagacaaagattgttgttctttttctcattgtcgcactaattgctacagactcacggattcttgtgtatgatttttaatttattttactcattttttaatgctcacatctactcagcatatatatatatattatatatatataatatatatgaagaagatgtggatcaaagactcatgagggcaagtgtaaaagacaaaagcacttgtttcatagggaacccactggtgacatttgagatatcaacatacaaaatccatcatacaaaaaggaaaagtaatgaaagactgtgaaaattatcagtatttatgtgtatatgtatattttctagttcatctatatagatatatatcatagatggcatatatgatatatatatgtcagatcaattagaaaacatacatatatatgtatgcatttttggtattaattaggaaactagttcttttgtttttcagacctgccctcatgagtctttgaccaaattcttgatttctggcacgatttgatgcccaaggctcaaagaatcttacctcatcccagctctgaaattggccgtgtctccttctagtggtcggagttattgagaaaccagataggttcatgagttgcttgtgctcagaaatagcatttctattttcttaggagagagggggcataaaatttatttttatgaaaaagatcatttttgaccaataatattctcagttcaaatttaatgctctacattattcagcttcttttactttggtgattttaatattaatgtaacttttggattatctgatgcttttccatcttgctcgtctgcaggtggaatgtcatccttacttcaaccagagaaaactgctggatttctgcaagtcaaaagacattgttctggttgcctatagtgctctgggatcccatcgagaagaaccatggtaataagagatacaggaagtttgccgaaaacactggtatgataaaaaagctgggagaaaaagggatcatgctgtttcctggagttcactcacagctgacttggggtgagggaagaatttgcatttctgacgagatcccaggtgatgttgaggctgctgtttgggggcctcgcttgagaagctccggtgcagagtggacgccttagtctgttagggagccgcctaacaaactgtatccccagcctcagggcctcagcctttctgcctttccttccagggtggacccgaactccccggtgctcttggaggacccagtcctttgtgccttggcaaaaaagcacaagcgaaccccagccctgattgccctgcgctaccagctgcagcgtggggttgtggtcctggccaagagctacaatgagcagcgcatcagacagaacgtgcaggtgaggagcggggctgtgggcctcaggtctcctgcacagtgtccttcacacgtgtgcttcttgtaaggctctcaggacagccttgggccagctccatttccctgtatttcctatgcatgaactctttgtgtacgtcataagggtttcttctactctagcacaggagaggcaacagaggtggagagtaataggatgggatcagaactacagatttgggttagcgttaagtcagtgatatccatatccctctgctggggccatgtccttttctttattttttataatgaagcattgattagatgttctttagtctccaactcatggcggatttttcttcttgtatgtttatgtagtataaattccttatatttattctcttagaattttatctttgcgaagtgcttgtttaactctgcctttttttttggcgaggtggttgtgtgtctttatttttatgtgtaggagaccatatttataccaataccttaggatataagacaaacccacttaatatagaggcttaatgcacaagcatttattgagctcaaggttccatggttagaaaattagcctgggctcagcctaaactcagtccattccttctattcctggctgggctctcatgtgtgttctgggcagtgaaggagctctgcttcaggatgtccctggggcatttgtgtgagtgcccccctctcccatgcagttctttatcctccagccatccagcccagggttcacctcagcacagggcatagtgaatggacatgtgcaaagcctttttaggtctaggctcagagacaccaaccattgcttctgggaaattctatcacctaatgcaagttacaggacaggtagactaaggggtggggaaacacacaccacctcttactggaaggaactgaaattcgatatagccaagcaagtggacacagggacatatgactgttagagggcatgttcctaattgaatcgtatcgattcatatgatatgtgtgaaataatatatcaatagttatatgtatgaatatgaatatatataaattgatatattatttcatatattctcaagaattcatacaagtctctaaagaattaacatccagaatacatacatatgtgtatgttttctaattaggtagatacataaaatatacatcatgtatgatatatattataaaacctatgtcatatatatgacatatatcatgtatatgtatatacgtcactatttgctaaaacattaagtaaaataagtgaagaaatcgataggatactctgaaatagtgatacagagaacgagagaataaaaaatgacaataatgaaacaattgatgaatcgaggtaatggcattccttaaattatttttaaaatatttttggacattagagaattccaaaaaaaaaatgaaaagttatgaaagaatgtggaaattataagtattaatacatatgtgtatgtctctaatcgatctagtatatataagatatatatgatatatgacatatgtgtatataatatatatgtagatactagaaccatacatatatatgtattatctgatataatcttagagacttgaatgtatcttgaaataacatctcccaaatttatctgcgttgtcatattctctgtggttatgtttttcacaaacaaaagtttctatccttcatgtagactaatttttcatgcctctttcttgtggttggtgtgtgttgtgtcttatcctatattgggaatatcacaatattttactgtgttatcttacaaaattgttaatattctttccttataaatttggttaattctaatgggtatgacttttaaaatattatgtgaaataaggatccaaatatgcgtatctaatttttgaatttttagcaaaatttaccatttattgaaaagtttatatttgctcacataacttgaatttttttacctgacacatatatgaaatgtccatgagcaattatctggcctctcttccatcttcagttaacttattcacttttctgtgctataatgttaaaaagtaagtttcacttcatatggacaatattttctacttcttcatttatttaataatatcttagttattcttgactaatgtgttatttaaaattttgaatcatcttattaacttccacaggcaagtaaatgttttagtctctcattgatcattgtaataagcctgcagatcaatgcagagagaactgaatctttgataatattgagatttccagtccatcgatcataatatgaatatcccactacttattaataaatcatctcttaataaatatatcattaattgcataaatttctccacgactgatcattttttttttgagacagagtctcgttctgtcacccagggtggagtgcagtggcacgaactcggctcactgcaacctccacctcccgggttcaagcagttctcctgcctcagcctccagagtagctgggactgctggcgcatgctgccatgcccagctaattttttgtattttagtagagacggggtttcactgtgttgcccaggctgttgcccaggctgttctctaactccgtaaatcaggcaatcctcctgcgctggcctcccaaagtgctaggattataggcgtgagccaacgtgcccggcaattactgataattttaatagtttttgacaacttttcattttcattttgtggattttctaatatatagaaatattaaaagaataatgcaacaaatcttctacctacattcatcaagtgttacattgctgtcatttttttactctctatctctcattttctgtattactccttcagtttccctatggatttatacacttatttgattgaatgtattagtttgagtgacatctttttgatatttagagtctcccaaatttacatagtgagtacccacaccttttgaatgtgaaatcgttagtatttagacaattattggcttgagtgatgttgaaaactgatttttcctattatacctgttcattggagagatagatattcaatgttattcatcaaacctactaaattatgctagacattacaaaattgcctctagattcttgtggggtcttctaggtacatggccctatcatgtgggcacaaagtaagctctgtttcttcttcagcttcctctgagatattctcttcatctgcagtgttgtgcagtttcaaaatattttatctgggaatggatttctgcttatttttgactggttttcattgaccacttgggtgtttagagaggtctttcataaattttggaaacgtatcaatcttttttaagtattgtctctgcaccctattgtctgatgaacttggttgttcccaattggcaatgatgtaatctaaaaataattaaagttccctattactgtgataggtgtttgaattccagttgacttcagaggagatgaaagccatagatggcctaaacagaaatgtgcgatatttgacccttgatatgtaagtgattttggagatggttgttctaatttatttcagaggaggaacgtaggatgggtgttgagagtgtgacctccacaccaggggcacagaggccaacgtagaacagaggtgagaacaggagctttctggaagtctcctcctggattcactccagagctctgttctctggcagggagagtggcctggggtcagcatgggtcaacctgtgcctctgctctcgtgactccaaggaactttccagagcagccaagatcattgctgaatccgcaccttccatgcaggcctgccgtttgtattactgtctagtgtacacactgtggatatggccatgtggtcgcattagatgtttccaaatctgcgcttctatcttgttcttcccaacctgctcaatgtcttaccagatgggaggcagttccgtcaatcttgtgggccaggttccaattccacctctttcacatggatgcttgctggatcctgtcaatttagcattttgaatcatttcaaaccttttacgagcctttctttgcatgttttcccatgagccaaatactgcatttgcctccagaaagtctgtcttagtggagcgaataggagcacttggccttggtgttctgcaatatggagatctcagtgtagagaatgagaagtgttaaaatcaaatgcagagtgtagatgcaaaagcaccattattggagataatttataaccagtaacgagacgttttactattcctctatattctaaggtttctaggattcatacgaaggatcattcatataatgagggaaaaaggaggtaaggtactgactgcagtaagaatttcaccaggtatataggggatgatggggattatgtgtgaaaaaaaacaagcacatggtacatcatagtacccaaaatttggtggatattattagtagtattttatccgcttagcagaaaatacaaaatgaaaaatggaaatgataataagaaaaggaaaagtggcaagcattagaaatgtttacttctgattaatgttttttatgatcatgaaatcaatcactagtgttattgggtagaactcaaatatggtctggagtaaaccacttgcgagctccaagtgtttgctctcggtgtaatcacaaaggataggctcaattccggtaattaacaagttataactgtatatgtgagcagtcatttatctgtgtctttacattttggattatgtctacctataaaatggtttatgcattgtagctctctaatattgggccctatacataaacaataatttaacgtgtctaatctaaccaagtgtgttgcgtatgataggcaggtagtaagtaatatgtaaagtaataaaataaagaacaattactaccagtataattaatgtactcaaaattgtttattagtgatgagcatatatcttccttattcctcttcaatgtaaggcagaaggagttcctgttggaagtgagaatgtgaaatagaaaaggtcagaatgtctctccattgacagatgtgggatctgttgttgagagatgtagagaaatatggtttgacatttcaccttgtgtgttttatgtggttaagttccaggcaggggaatagaattaaattattctttattttgaaaatcaagatatgataaagtcacgagttcattaaacaaagaaacacagattctagagcagtcagaaaatgaacttcttaacatctacactagcggcagcttcctagaaatcactgcgctaccggctagtaacggagtcattgccattcagagtgtgcatttttttttcctctttccagttttgctggcccccctaattatccgatttctgatgaatattaacatggagggcattgcatgaggtctgccagaaggccctgcgtgtggatggtgacacagaggatggctctatgctggtgactggacacatggcc

SEQ ID NO: 1805 - DNA, 791 bp, Homo sapiens
ctctggctggacgccgccgccgccgctgccaccgcctctgatccaagccacctcccgccagagaggtgtcatgggcttccaaaagttctcccccttcctggctctcagcatcttggtcctgttgcaggcaggcagcctccatgcagcaccattcaggtctgccctggagagcagcccagcagacccggccacgctcagtgaggacgaagcgcgcctcctgctggctgcactggtgcaggactatgtgcagatgaaggccagtgagctggagcaggagcaagagagagagggctccagcctggacagccccagatctaagcggtgcggtaatctgagtacttgcatgctgggcacatacacgcaggacttcaacaagtttcacacgttcccccaaactgcaattggggttggagcacctggaaagaaaagggatatgtccagcgacttggagagagaccatcgccctcatgttagcatgccccagaatgccaactaaactcctccctttccttcctaatttcccttcttgcatccttcctataacttgatgcatgtggtttggttcctctctggtggctctttgggctggtattggtggctttccttgtggcagaggatgtctcaaacttcagatgggaggaaagagagcaggactcacaggttggaagagaatcacctgggaaaataccagaaaatgagggccgctttgagtcccccagagatgtcatcagagctcctctgtcctgcttctgaatgtgctgatcatttgaggaataaaattatttttcccc

SEQ ID NO: 1806 - protein, 255 aa, Homo sapiens
MVIALLGVWTSVAVVWFDLVDYEEVLGKLGIYDADGDGDFDVDDAKVLLGLKERSTSEPAVPPEEAEPHTEPEEQVPVEAEPQNIEDEAKEQIQSLLHEMVHAEHVEGEDLQQEDGPTGEPQQEDDEFLMATDVDDRFETLELEVSHEETEHSYHVEETVSQDCNQDMEEMMSEQENPDSSEPVVEDERLHHDTDDVTYQVYEEQAVYEPLENEGIEITEVTVPPEDNPVEDSQVIVEEVSIFPVEEQQEVPPDT

SEQ ID NO: 1807 - protein, 226 aa, Homo sapiens
MPLSQIKKVLDIRETEDCHNAFALLVRPPTEQANVLLSFQMTSDELPKENWLKMLCRHVANTICKADAENLIYTADPESFEVNTKDMDSTLSRASRAIKKTSKKVTRAFSFSKTPKRALRRALMTSHGSVEGRSPSSNDKHVMSRLSSTSSLAITHSVSTSNVIGFTKHVYVQRLNSTGGRSQYSWFQSVRHSAFRASFSEILEGNTDFSNFKKVLSKSSLTFVKN

SEQ ID NO: 1808 - protein, 52 aa, Homo sapiens [sequence omitted]

SEQ ID NO: 1809 - protein, 592 aa, Homo sapiens
MASEIHMTGPMCLIENTNGRLMANPEALKILSAITQPMVVVAIVGLYRTGKSYLMNKLAGKKKGFSLGSTVQSHTKGIWMWCVPHPKKPGHILVLLDTEGLGDVEKGDNQNDSWIFALAVLLSSTFVYNSIGTINQQAMDQLYYVTELTHRIRSKSSPDENENEVEDSADFVSFFPDFVWTLRDFSLDLEADGQPLTPDEYLTYSLKLKKGTSQKDETFNLPRLCIRKFFPKKKCFVFDRPVHRRKLAQLEKLQDEELDPEFVQQVADFCSYIFSNSKTKTLSGGIQVNGPRLESLVLTYVNAISSGDLPCMENAVLALAQIENSAAVQKAIAHYEQQMGQKVQLPTESLQELLDLHRDSEREAIEVFIRSSFKDVDHLFQKELAAQLEKKRDDFCKQNQEASSDRCSGLLQVIFSPLEEEVKAGIYSKPGGYRLFVQKLQDLKKKYYEEPRKGIQAEEILQTYLKSKESMTDAILQTDQTLTEKEKEIEVERVKAESAQASAKMLQEMQRKNEQMMEQKERSYQEHLKQLTEKMENDRVQLLKEQERTLALKLQEQEQLLKEGFQKESRIMKNEIQDLQTKMRRRKACTIS

SEQ ID NO: 1810 - protein, 57 aa, Homo sapiens [sequence omitted]

SEQ ID NO: 1811 - protein, 148 aa, Homo sapiens
MRGSELPLVLLALVLCLAPRGRAVPLPAGGGTVLTKMYPRGNHWAVGHLMGKKSTGESSSVSERGSLKQQLREYIRWEEAARNLLGLIEAKENRNHQPPQPKALGNQQPSWDSEDSSNFKDVGSKGKVGRLSAPGSQREGRNPQLNQQ

SEQ ID NO: 1812 - protein, 474 aa, Homo sapiens
MVQQTNNAENTEALLAGESSDSGAGLELGIASSPTPGSTASTGGKADDPSWCKTPSGHIKRPMNAFMVWSQIERRKIMEQSPDMHNAEISKRLGKRWKLLKDSDKIPFIREAERLRLKHMADYPDYKYRPRKKVKSGNANSSSSAAASSKPGEKGDKVGGSGGGGHGGGGGGGSSNAGGGGGGASGGGANSKPAQKKSCGSKVAGGAGGGVSKPHAKLILAGGGGGGKAAAAAAASFAAEQAGAAALLPLGAAADHHSLYKARTPSASASASSAASASAALAAPGKHLAEKKVKRVYLFGGLGTSSSPVGGVGAGADPSDPLGLYEEEGAGCSPDAPSLSGRSSAASSPAAGRSPADHRGYASLRAASPAPSSAPSHASSSASSHSSSSSSSGSSSSDDEFEDDLLDLNPSSNFESMSLGSFSSSSALDRDLDFNFEPGSGSHFEFPDYCTPEVSEMISGDWLESSISNLVFTY

SEQ ID NO: 1813 - protein, 238 aa, Homo sapiens
MESSAKMESGGAGQQPQPQPQQPFLPPAACFFATAAAAAAAAAAAAAQSAQQQQQQQQQQQQQQAPQLRPAADGQPSGGGHKSAPKQVKRQRSSSPELMRCKRRLNFSGFGYSLPQQQPAAVARRNERERNRVKLVNLGFATLREHVPNGAANKKMSKVETLRSAVEYIRALQQLLDEHDAVSAAFQAGVLSPTISPNYSNDLNSMAGSPVSSYSSDEGSYDPLSPEEQELLDFTNWF

SEQ ID NO: 1814 - protein, 68 aa, Homo sapiens
MVYYPELFVWVSQEPFPNKDMEGRLPKGRLPVPKEVNRKKNDETNAASLTPLGSSELRSPRISYLHFF

SEQ ID NO: 1815 - protein, 572 aa, Homo sapiens
MSYQGKKSIPHITSDRLLIKGGRIINDDQSLYADVYLEDGLIKQIGENLIVPGGVKTIEANGRMVIPGGIDVNTYLQKPSQGMTAADDFFQGTRAALVGGTTMIIDHVVPEPGSSLLTSFEKWHEAADTKSCCDYSLHVDITSWYDGVREELEVLVQDKGVNSFQVYMAYKDVYQMSDSQLYEAFTFLKGLGAVILVHAENGDLIAQEQKRILEMGITGPEGHALSRPEELEAEAVFRAITIAGRINCPVYITKVMSKSAADIIALARKKGPLVFGEPIAASLGTDGTHYWSKNWAKAAAFVTSPPLSPDPTTPDYLTSLLACGDLQVTGSGHCPYSTAQKAVGKDNFTLIPEGVNGIEERMTVVWDKAVATGKMDENQFVAVTSTNAAKIFNLYPRKGRIAVGSDADVVIWDPDKLKTITAKSHKSAVEYNIFEGMECHGSPLVVISQGKIVFEDGNINVNKGMGRFIPRKAFPEHLYQRVKIRNKVFGLQGVSRGMYDGPVYEVPATPKYATPAPSAKSSPSKHQPPPIRNLHQSNFSLSGAQIDDNNPRRTGHRIVAPPGGRSNITSLG

SEQ ID NO: 1816 - protein, 325 aa, Homo sapiens
MTERRRDELSEEINNLREKVMKQSEENNNLQSQVQKLTEENTTLREQVEPTPEDEDDDIELRGAAAAAAPPPPIEEECPEDLPEKFDGNPDMLAPFMAQCQIFMEKSTRDFSVDRVRVCFVTSMMTGRAARWASAKLERSHYLMHNYPAFMMEMKHVFEDPQRREVAKRKIRRLRQGMGSVIDYSNAFQMIAQDLDWNEPALIDQYHEGLSDHIQEELSHLEVAKSLSALIGQCIHIERRLARAAAARKPRSPPRALVLPHIASHHQVDPTEPVGGARMRLTQEEKERRRKLNLCLYCGTGGHYADNCPAKASKSSPAGNSPAPL

SEQ ID NO: 1817 - protein, 357 aa, Homo sapiens
MLQIHLPGRHTLFVRAMIDSGASGNFIDHEYVAQNGIPLRIKDWPILVEAIDGRPIASGPVVHETHDLIVDLGDHREVLSFDVTQSPFFPVVLGVRWLSTHDPNITWSTRSIVFDSEYCRYHCRMYSPIPPSLPPPAPQPPLYYPVDGYRVYQPVRYYYVQNVYTPVDEHVYPDHRLVDPHIEMIPGAHSIPSGHVYSLSEPEMAALRDFVARNVKDGLITPTIAPNGAQVLQVKRGWKLQVSYDCRAPNNFTIQNQYPRLSIPNLEDQAHLATYTEFVPQIPGYQTYPTYAAYPTYPVGFAWYPVGRDGQGRSLYVPVMITWNPHWYRQPPVPQYPPPQPPPPPPPPPPPPSYSTL

SEQ ID NO: 1818 - protein, 102 aa, Homo sapiens [sequence omitted]

SEQ ID NO: 1819 - protein, 831 aa, Homo sapiens
MERAGATSRGGQAPGFLLRLHTEGRAEAARVQEQDLRQWGLTGIHLRSYQLEGVNWLAQRFHCQNGCILGDEMGLGKTCQTIALFIYLAGRLNDEGPFLILCPLSVLSNWKEEMQRFAPGLSCVTYAGDKEERACLQQDLKQESRFHVLLTTYEICLKDASFLKSFPWSVLVVDEAHRLKNQSSLLHKTLSEFSVVFSLLLTGTPIQNSLQELYSLLSFVEPDLFSKEEVGDFIQRYQDIEKESESASELHKLLQPFLLRRVKAEVATELPKKTEVVIYHGMSALQKKYYKAILMKDLDAFENETAKKVKLQNILSQLRKCVDHPYLFDGVEPEPFEVGDHLTEASGKLHLLDKLLAFLYSGGHRVLLFSQMTQMLDILQDYMDYRGYSYERVDGSVRGEERHLAIKNFGQQPIFVFLLSTRAGGVGMNLTAADTVIFVDSDFNPQNDLQAAARAHRIGQNKSVKVIRLIGRDTVEEIVYRKAASKLQLTNMIIEGGHFTLGAQKPAADADLQLSEILKFGLDKLLASEGSTMDEIDLESILGETKDGQWVSDALPAAEGGSRDQEEGKNHMYLFEGKDYSKEPSKEDRKSFEQLVNLQKTLLEKASQEGRSLRNKGSVLIPGLVEGSTKRKRVLSPEELEDRQKKRQEAAAKRRRLIEEKKRQKEEAEHKKKVAWWESNNYQSFCLPSEESEPEDLENGEESSAELDYQDPDATSLKYVSGDVTHPQAGAEDALIVHCVDDSGHWGRGGLFTALEKRSAEPRKIYELAGKMKDLSLGGVLLFPVDDKESRNKGQDLLALIVAQHRDRSNVLSGIKMAALEEGLKKIFLAA

SEQ ID NO: 1820 - protein, 212 aa, Homo sapiens
MLNKVLSRLGVAGQWRFVDVLGLEEESLGSVPAPACALLLLFPLTAQHENFRKKQIEELKGQEVSPKVYFMKQTIGNSCGTIGLIHAVANNQDKLGFEDGSVLKQFLSETEKMSPEDRAKCFEKNEAIQAAHDAVAQEGQCRVDDKVNFHFILFNNVDGHLYELDGRMPFPVNHGASSEDTLLKDAAKVCREFTEREQGEVRFSAVALCKAA

SEQ ID NO: 1821 - protein, 323 aa, Homo sapiens [sequence omitted]

SEQ ID NO: 1822 - protein, 141 aa, Homo sapiens
MGFQKFSPFLALSILVLLQAGSLHAAPFRSALESSPADPATLSEDEARLLLAALVQDYVQMKASELEQEQEREGSSLDSPRSKRCGNLSTCMLGTYTQDFNKFHTFPQTAIGVGAPGKKRDMSSDLERDHRPHVSMPQNAN

SEQ ID NO: 1823 - DNA, 6188 bp, Homo sapiens
caacaacaacaactccaagcacaccggccataagagtgcgtgtgtccccaacatgaccgaacgaagaagggacgagctctctgaagagatcaacaacttaagagagaaggtcatgaagcagtcggaggagaacaacaacctgcagagccaggtgcagaagctcacagaggagaacaccacccttcgagagcaagtggaacccacccctgaggatgaggatgatgacatcgagctccgcggtgctgcagcagctgctgccccaccccctccaatagaggaagagtgcccagaagacctcccagagaagttcgatggcaacccagacatgctggctcctttcatggcccagtgccagatcttcatggaaaagagcaccagggatttctcagttgatcgtgtccgtgtctgcttcgtgacaagcatgatgaccggccgtgctgcccgttgggcctcagcaaagctggagcgctcccactacctgatgcacaactacccagctttcatgatggaaatgaagcatgtctttgaagaccctcagaggcgagaggttgccaaacgcaagatcagacgcctgcgccaaggcatggggtctgtcatcgactactccaatgctttccagatgattgcccaggacctggattggaacgagcctgcgctgattgaccagtaccacgagggcctcagcgaccacattcaggaggagctctcccacctcgaggtcgccaagtcgctgtctgctctgattgggcagtgcattcacattgagagaaggctggccagggctgctgcagctcgcaagccacgctcgccaccccgggcgctggtgttgcctcacattgcaagccaccaccaggtagatccaaccgagccggtgggaggtgcccgcatgcgcctgacgcaggaagaaaaagaaagacgcagaaagctgaacctgtgcctctactgtggaacaggaggtcactacgctgacaattgtcctgccaaggcctcaaagtcttcgccggcgggaaactccccggccccgctgtagagggaccttcagcgaccgggccagaaataataaggtccccacaagatgatgcctcatctccacacttgcaagtgatgctccagattcatcttccgggcagacacaccctgttcgtccgagccatgatcgattctggtgcttctggcaacttcattgatcacgaatatgttgctcaaaatggaattcctctaagaatcaaggactggccaatacttgtggaagcaattgatgggcgccccatagcatcgggcccagttgtccacgaaactcacgacctgatagttgacctgggagatcaccgagaggtgctgtcatttgatgtgactcagtctccattcttccctgtcgtcctaggggttcgctggctgagcacacatgatcccaatatcacatggagcactcgatctatcgtctttgattctgaatactgccgctaccactgccggatgtattctccaataccaccatcgctcccaccaccagcaccacaaccgccactctattatccagtagatggatacagagtttaccaaccagtgaggtattactatgtccagaatgtgtacactccagtagatgagcacgtctacccagatcaccgcctggttgaccctcacatagaaatgatacctggagcacacagtattcccagtggacatgtgtattcactgtccgaacctgaaatggcagctcttcgagattttgtggcaagaaatgtaaaagatgggctaattactccaacgattgcacctaatggagcccaagttctccaggtgaagagggggtggaaactgcaagtttcttatgattgccgagctccaaacaattttactatccagaatcagtatcctcgcctatctattccaaatttagaagaccaagcacacctggcaacgtacactgaattcgtacctcaaatacctggataccaaacataccccacatatgccgcgtacccgacctacccagtaggattcgcctggtacccagtgggacgagacggacaaggaagatcactatatgtacctgtgatgatcacttggaatccacactggtaccgccagcctccggtaccacagtacccgccgccacagccgccgcctccaccaccaccaccgccgccgcctccatcttacagtaccctgtaaatacctgtcatgtccttcaggatctctgccctcaaaatttattcctgttcagcttctcaatcagtgactgtgtgctaaattttaggctactgtatcttcaggccacctgaggcacatcctctctgaaacggctatggaaggttagggccactctggactggcacacatcctaaagcaccaaaagaccttcaacattttctgagagcaacagagtatttgccaataaatgatctctcatttttccaccttgactgccaatctaactaaaataattaataagtttactttccagccagtcctggaagtctgggttttacctgccaaaacctccatcaccatctaaattataggctgccaaatttgctgtttaacatttacagagaagctgatacaaacgcaggaaatgctgatttctttatggagggggagacgaggaggaggaggacatgacttttcttgcggtttcggtaccctctttttaaatcactggaggactgaggccttattaaggaagccaaaattatcggtgcagtgtggaaaggcttccgtgatcctctcgctgcacccttagaaacttcaccgtcttcaaactccatttccatggttctgttaattctcaaggagcagcaactcgactggttctcccaggagcaggaaaaacccttgtgacatgaaacatctcaggcctgaaaagaaagtgctctctcagatggactcttgcatgttaagactatgtcttcacatcatggtgcaaatcacatgtacccaatgactccggctttgacacaacaccttaccatcatcatgccatgatggcttccacaaagcattaaacctggtaaccagagattactggtggctccagcgttgttagatgttcatgaaatgtgaccacctctcaatcacctttgagggctaaagagtagcacatcaaaaggactccaaaatcccatacccaactcttaagagatttgtcctggtacttcagaaagaattttcatgagtgttcttaattggctggaaaagcaccagctgacgttttggaagaatctatccatgtgtctgcctccatatgcatctgggcatttcatcttcagtcccctcattagactgtagcattaggatgtgtggagagaggagaaatgatttagcacccagattcacactcctatgcctggaagggggacatctttgaagaagaggaattagggctgtggacactgtcttgaggatgtggacttccttagtgagctccacattacttgatggtaaccacttcaaaaggatcagaatccacgtaatgaaaaaggtccctctagaggatggagctgatgtgaagctgccaatggatgaaaagcctcagaaagcaactcaaaggactcaaagcaacggacaacacaagagttgtcttcagcccagtgacacctctgatgtcccctggaagctttgtgctaacctgggactgcctgacttcctttagcctggtcccttgctactaccttgaactgttttatctaacctctctttttctgtttaattctttgctactgccattgaccctgctgcaggatttgtgtcattttcctgcctggttgctgagactccattttgctgccacacacagagatgtaagaggcaggctttaattgccaaagcacagtttgagcagtagaaaacaacatggtgtatatctcaaattgcctgacatgaagaggagtctaacggtgaagtttcacttttcatcagcatcatctttcacatgttcattatcatccgctcttattcttgcatgtttaaacacttaaaatttttagtataatttttagtgtgttttgaagtggtgactaggctttcaaaaacttccattgaattacaaagcactatccagttcttattgttaaactaagtaaaaatgataagtaacatagtgtaaaatattcctttactgtgaacttcttacaatgctgtgaatgagaggctcctcagaactggagcatttgtataataattcatcctgttcatcttcaattttaacatcatatataatttcaattctatcaattgggcctttaaaaatcatataaaaggatataaaatttgaaaagagaaacctaattggctatttaatccaaaacaacttttttttttccttcaatggaatcagaaagcttgtcaatcactcatgtgttttagagtaattacttttaaaatggtgcatttgtgcttctgaactattttgaagagtcacttctgtttacctcaagtatcaattcatcctccatacatttgaattcaagttgttttttgtcaaatttacagttgtcaattgatcttcaagctgcagggtgcctagaaatgggccgttgtctgtagccctggcatgtgcacacggacatttgccaccactgcaagcaaaagtctggagaagttcaccaacgacaagaacgattagggaaaatatgctgctgtgggttaacaactcagaaagtccctgatccacatttggctgtttactaaagcttgtgattaactttttggcagtgtgtactatgctctattgctatatatgctatctataaatgtagatgttaaggataagtaattctaaatttattattctatagttttgaagtttggttaagtttcctttcactcaattgatttattttgttgttaatcaaatttatgttaattggatcctttaaattttttttggcattttccaacaaaaatggctttattcataagaaaggaaaaaaatcaatggaatttgatatctaaagaagttagaaagggagcaaaataaaaaacataaaggagatagatgaattagtaagcaaatcagtagtcgagtttttcaaactggcaaaattaattaattgacttttagcccaaatttacattgttaattaaatcaagaaggaagaagatctaagagctcccattgataggcaagcctagagagaactagctaaatttatcatgctaggatattgaaacacagaaagtttacatacatttatgaagggtcaatttagtttggacagtgaggtatttgtcttagtggaaaaaaggagaattagtctgatcaaatcgtgaagtaatacagtgaacttgcaggtgcacaaaataagagggccacatctatatggtgcagtctggaattctgtttaagtttgtaggtacctcttggacttctgaattgatccagttgtcatccaccacagacatctcacatcagatacagacagttccaagattgacaacagagaacaacctgctggaaagacctgggcagaaatggagagccctgcgggaaccatgctacattttcatctaaagagagaatgcacatctgatgagactgaaagttctttgttgttttagattgtagaatggtattgaattggtctgtggaaaattgcattgcttttatttctttgtgtaatcaagtttaagtaataggggatatataatcataagcattttagggtgggagggactattaagtaattttaagtgggtggggttatttagaatgttagaataatattatgtattagatatcgctataagtggacatgcgtacttacttgtaaccctttaccctataattgctatccttaaagatttcaaataaactcggagggaactgcagggagaccaacttatttagagcgaattggacatggataaaaaccccagtgggagaaagttcaaaggtgattagattaataatttaatagaggatgagtgacctctgataaattactgctagaatgaacttgtcaatgatggatggtaaattttcatggaagttataaaagtgataaataaaaacccttgcttttacccctgtcagtagccctcctcctaccactgaaccccattgcccctacccctccttctaactttattgctgtattctcttcactctatatttctctctatttgctaatattgcattgctgttacaataaaaattcaataaagatttagtggttaagtgc

SEQ ID NO: 1824 - DNA, 866 bp, Homo sapiens
ggcagagccacaggaaggatgaggaagaccaggctctgggggctgctgtggatgctctttgtctcagaactccgagctgcaactaaattaactgaggaaaagtatgaactgaaagaggggcagaccctggatgtgaaatgtgactacacgctagagaagtttgccagcagccagaaagcttggcagataataagggacggagagatgcccaagaccctggcatgcacagagaggccttcaaagaattcccatccagtccaagtggggaggatcatactagaagactaccatgatcatggtttactgcgcgtccgaatggtcaaccttcaagtggaagattctggactgtatcagtgtgtgatctaccagcctcccaaggagcctcacatgctgttcgatcgcatccgcttggtggtgaccaagggtttttcagggacccctggctccaatgagaattctacccagaatgtgtataagattcctcctaccaccactaaggccttgtgcccactctataccagccccagaactgtgacccaagctccacccaagtcaactgccgatgtctccactcctgactctgaaatcaaccttacaaatgtgacagatatcatcagggttccggtgttcaacattgtcattctcctggctggtggattcctgagtaagagcctggtcttctctgtcctgtttgctgtcacgctgaggtcatttgtaccctaggcccacgaacccacgagaatgtcctctgacttccagccacatccatctggcagttgtgccaagggaggagggaggaggtaaaaggcagggagttaataacatgaattaaatctgtaatcaccrgctaaaaaaaaaaaaaaaaa

SEQ ID NO: 1825 - protein, 234 aa, Homo sapiens
MRKTRLWGLLWMLFVSELRAATKLTEEKYELKEGQTLDVKCDYTLEKFASSQKAWQIIRDGEMPKTLACTERPSKNSHPVQVGRIILEDYHDHGLLRVRMVNLQVEDSGLYQCVIYQPPKEPHMLFDRIRLVVTKGFSGTPGSNENSTQNVYKIPPTTTKALCPLYTSPRTVTQAPPKSTADVSTPDSEINLTNVTDIIRVPVFNIVILLAGGFLSKSLVFSVLFAVTLRSFVP

SEQ ID NO: 1826 - DNA, 192 bp, Homo sapiens
atgcggtgccacgcccatggaccttcttgtctcgtcacggccataactagggaggaaggagggccgaggagtggaggggctcaggcgaagctggggtgctgttgggggtatccgagtcccagaagcacctggaaccccgacagaagattctggactccccagacgggaccaggagagggacggcatgagcga

SEQ ID NO: 1827 - DNA, 288 bp, Homo sapiens
cacacacaaacacagaaccacacagccagtcccaggagcccagtaatggagagccccaaaaagaagaaccagcagctgaaagtcgggatcctacacctgggcagcagacagaagaagatcaggatacagctgagatcccagtgcgcgacatggaaggtgatctgcaagagctgcatcagtcaaacaccggggataaatctggatttgggttccggcgtcaaggtgaagataatacctaaagaggaacactgtaaaatgccagaagcaggtgaagagcaaccacaagtt

SEQ ID NO: 1828 - DNA, 141 bp, Homo sapiens
cacacacaaacacagaaccacacagccagtcccaggagcccagtaatggagagccccaaaaagaagaaccagcagctgaaagtcgggatcctacacctgggcagcagacagaagaagatcaggatacagctgagatcccag

SEQ ID NO: 1829 - DNA, 111 bp, Homo sapiens
gtgctgggaagggaaatgcgcgacatggaaggtgatctgcaagagctgcatcagtcaaacaccggggataaatctggatttgggttccggcgtcaaggtgaagataatacc

SEQ ID NO: 1830 - protein, 64 aa, Homo sapiens
MRCHAHGPSCLVTAITREEGGPRSGGAQAKLGCCWGYPSPRSTWNPDRRFWTPQTGPGEGRHER

SEQ ID NO: 1831 - protein, 96 aa, Homo sapiens
HTQTQNHTASPRSPVMESPKKKNQQLKVGILHLGSRQKKIRIQLRSQCATWKVICKSCISQTPGINLDLGSGVKVKIIPKEEHCKMPEAGEEQPQV

SEQ ID NO: 1832 - protein, 47 aa, Homo sapiens
HTQTQNHTASPRSPVMESPKKKNQQLKVGILHLGSRQKKIRIQLRSQ

SEQ ID NO: 1833 - protein, 37 aa, Homo sapiens
VLGREMRDMEGDLQELHQSNTGDKSGFGFRRQGEDNT

SEQ ID NO: 1834 - protein, 20 aa, Homo sapiens
MAKGDPKKPKGKTSAYAFFV

SEQ ID NO: 1835 - protein, 20 aa, Homo sapiens
PKGKTSAYAFFVQTCREEHK

SEQ ID NO: 1836 - protein, 20 aa, Homo sapiens
AFFVQTCREEHKKKNPEVPV

SEQ ID NO: 1837 - protein, 20 aa, Homo sapiens
EEHKKKNPEVPVNFAEFSKK

SEQ ID NO: 1838 - protein, 20 aa, Homo sapiens
EVPVNFAEFSKKCSERWKTV

SEQ ID NO: 1839 - protein, 20 aa, Homo sapiens
FSKKCSERWKTVSGKEKSKF

SEQ ID NO: 1840 - protein, 20 aa, Homo sapiens
WKTVSGKEKSKFDEMAKADK

SEQ ID NO: 1841 - protein, 20 aa, Homo sapiens
KSKFDEMAKADKVRYDREMK

SEQ ID NO: 1842 - protein, 20 aa, Homo sapiens
KADKVRYDREMKDYGPAKGG

SEQ ID NO: 1843 - protein, 20 aa, Homo sapiens
REMKDYGPAKGGKKKKDPNA

SEQ ID NO: 1844 - protein, 20 aa, Homo sapiens
AKGGKKKKDPNAPKRPPSGF

SEQ ID NO: 1845 - protein, 20 aa, Homo sapiens
DPNAPKRPPSGFFLFCSEFR

SEQ ID NO: 1846 - protein, 20 aa, Homo sapiens
PSGFFLFCSEFRPKIKSTNP

SEQ ID NO: 1847 - protein, 20 aa, Homo sapiens
SEFRPKIKSTNPGISIGDVA

SEQ ID NO: 1848 - protein, 20 aa, Homo sapiens
STNPGISIGDVAKKLGEMWN

SEQ ID NO: 1849 - protein, 20 aa, Homo sapiens
GDVAKKLGEMWNNLNDSEKQ

SEQ ID NO: 1850 - protein, 20 aa, Homo sapiens
EMWNNLNDSEKQPYITKAAK

SEQ ID NO: 1851 - protein, 20 aa, Homo sapiens
SEKQPYITKAAKLKEKYEKD

SEQ ID NO: 1852 - protein, 20 aa, Homo sapiens
KAAKLKEKYEKDVADYKSKG

SEQ ID NO: 1853 - protein, 20 aa, Homo sapiens
YEKDVADYKSKGKFDGAKGP

SEQ ID NO: 1854 - protein, 20 aa, Homo sapiens
KSKGKFDGAKGPAKVARKKV

SEQ ID NO: 1855 - protein, 20 aa, Homo sapiens
AKGPAKVARKKVEEEDEEEE

SEQ ID NO: 1856 - protein, 20 aa, Homo sapiens
RKKVEEEDEEQEEEEEEEEE

SEQ ID NO: 1857 - DNA, 28 bp, Artificial Sequence
  PCR primer
agtgcgaattcgggctgcgtgcaggagg

SEQ ID NO: 1858 - DNA, 32 bp, Artificial Sequence
  PCR primer
ggactcgagctactgcaagtctggtgtggatg

SEQ ID NO: 1859 - DNA, 33 bp, Artificial Sequence
  PCR primer
agatgaattcacgcgtccgcgccgcgcggcgca

SEQ ID NO: 1860 - DNA, 31 bp, Artificial Sequence
  PCR primer
agttctcgagtcacctccctgggcccctttg

SEQ ID NO: 1861 - DNA, 945 bp, Homo sapiens
atgcatcaccatcaccatcacacggccgcgtccgataacttccagctgtcccagggtgggcagggattcgccattccgatcgggcaggcgatggcgatcgcgggccagatcaagcttcccaccgttcatatcgggcctaccgccttcctcggcttgggtgttgtcgacaacaacggcaacggcgcacgagtccaacgcgtggtcgggagcgctccggcggcaagtctcggcatctccaccggcgacgtgatcaccgcggtcgacggcgctccgatcaactcggccaccgcgatggcggacgcgcttaacgggcatcatcccggtgacgtcatctcggtgacctggcaaaccaagtcgggcggcacgcgtacagggaacgtgacattggccgagggacccccggccgaattcacgcgtccgcgccgcgcggcgcaggggaggcgagaggcgccccccggtggagagcctgagccccgcgcaagtctggcggcacctggcgagcggagccggagtcgggctggggaccgcggggttgaggccggaccgcggcggggtcgggggagaaacgcgcgctgccctggcacgggccccaaccccccggccgcgcggaatggtatggcccggccggagttaaggccggggggaggcggcgagtcccgcggcggcggcgacgatggggctgcgtgcaggaggaacgctgggcagggccggcgcgggtcggggggcgcccgaggggcccgggccgagcggcggcgcgcagggcggcagcatccactcgggccgcatcgccgcggtgcacaacgtgccgctgagcgtgctcatccggccgctgccgtccgtgttggaccccgccaaggtgcagagcctcgtggacacgatccgggaggacccagacagcgtgccccccatcgatgtcctctggatcaaaggggcccagggaggtga

SEQ ID NO: 1862 - DNA, 822 bp, Homo sapiens
atgcatcaccatcaccatcacacggccgcgtccgataacttccagctgtcccagggtgggcagggattcgccattccgatcgggcaggcgatggcgatcgcgggccagatcaagcttcccaccgttcatatcgggcctaccgccttcctcggcttgggtgttgtcgacaacaacggcaacggcgcacgagtccaacgcgtggtcgggagcgctccggcggcaagtctcggcatctccaccggcgacgtgatcaccgcggtcgacggcgctccgatcaactcggccaccgcgatggcggacgcgcttaacgggcatcatcccggtgacgtcatctcggtgacctggcaaaccaagtcgggcggcacgcgtacagggaacgtgacattggccgagggacccccggccgaattcgggctgcgtgcaggaggaacgctgggcagggccggcgcgggtcggggggcgcccgaggggcccgggccgagcggcggcgcgcagggcggcagcatccactcgggccgcatcgccgcggtgcacaacgtgccgctgagcgtgctcatccggccgctgccgtccgtgttggaccccgccaaggtgcagagcctcgtggacacgatccgggaggacccagacagcgtgccccccatcgatgtcctctggatcaaaggggcccagggaggtgactacttctactcctttgggggctgccaccgctacgcggcctaccagcaactgcagcgagagaccatccccgccaagcttgtccagtccactctctcagacctaagggtgtacctgggagcatccacaccagacttgcagtag

SEQ ID NO: 1863 - protein, 314 aa, Homo sapiens [sequence omitted]

SEQ ID NO: 1864 - protein, 273 aa, Homo sapiens
MHHHHHHTAASDNFQLSQGGQGFAIPIGQAMAIAGQIKLPTVHIGPTAFLGLGVVDNNGNGARVQRVVGSAPAASLGISTGDVITAVDGAPINSATAMADALNGHHPGDVISVTWQTKSGGTRTGNVTLAEGPPAEFGLRAGGTLGRAGAGRGAPEGPGPSGGAQGGSIHSGRIAAVHNVPLSVLIRPLPSVLDPAKVQSLVDTIREDPDSVPPIDVLWIKGAQGGDYFYSFGGCHRYAAYQQLQRETIPAKLVQSTLSDLRVYLGASTPDLQ

SEQ ID NO: 1865 - DNA, 790 bp, Homo sapiens
ctgattccgcgactccttggccgccgctgcgcatggaaagctctgccaagatggagagcggcggcgccggccagcagccccagccgcagccccagcagcccttcctgccgcccgcagcctgtttctttgccacggccgcagccgcggcggccgcagccgccgcagcggcagcgcagagcgcgcagcagcagcagcagcagcagcagcagcagcagcaggcgccgcagctgagaccggcggccgacggccagccctcagggggcggtcacaagtcagcgcccaagcaagtcaagcgacagcgctcgtcttcgcccgaactgatgcgctgcaaacgccggctcaacttcagcggctttggctacagcctgccgcagcagcagccggccgccgtggcgcgccgcaacgagcgcgagcgcaaccgcgtcaagttggtcaacctgggctttgccacccttcgggagcacgtccccaacggcgcggccaacaagaagatgagtaaggtggagacactgcgctcggcggtcgagtacatccgcgcgctgcagcagctgctggacgagcatgacgcggtgagcgccgccttccaggcaggcgtcctgtcgcccaccatctcccccaactactccaacgacttgaactccatggccggctcgccggtctcatcctactcgtcggacgagggctcttacgacccgctcagccccgaggagcaggagcttctcgacttcaccaactggttctgaggggctcggcctggtcaggccctggtgcgaatggactttggaagcag

SEQ ID NO: 1866 - DNA, 784 bp, Homo sapiens
ccgcgactccttggccgccgctgcgcatggaaagctctgccaagatggagagcggcggcgccggccagcagccccagccgcagccccagcagcccttcctgccgcccgcagcctgtttctttgccacggccgcagccgcggcggccgcagccgccgcagcggcagcgcagagcgcgcagcagcagcagcagcagcagcagcagcagcagcaggcgccgcagctgagaccggcggccgacggccagccctcagggggcggtcacaagtcagcgcccaagcaagtcaagcgacagcgctcgtcttcgcccgaactgatgcgctgcaaacgccggctcaacttcagcggctttggctacagcctgccgcagcagcagccggccgccgtggcgcgccgcaacgagcgcgagcgcaaccgcgtcaagttggtcaacctgggctttgccacccttcgggagcacgtccccaacggcgcggccaacaagaagatgagtaaggtggagacactgcgctcggcggtcgagtacatccgcgcgctgcagcagctgctggacgagcatgacgcggtgagcgccgccttccaggcaggcgtcctgtcgcccaccatctcccccaactactccaacgacttgaactccatggccggctcgccggtctcatcctactcgtcggacgagggctcttacgacccgctcagccccgaggagcaggagcttctcgacttcaccaactggttctgaggggctcggcctggtcaggccctggtgcgaatggactttggaagcag

SEQ ID NO: 1867 - DNA, 789 bp, Homo sapiens
ttccgcgactccttggccgccgctgcgcatggaaagctctgccaagatggagagcggcggcgccggccagcagccccagccgcagccccagcagcccttcctgccgcccgcagcctgtttctttgccacggccgcagccgcggcggccgcagccgccgcagcggcagcgcagagcgcgcagcagcagcagcagcagcagcagcagcagcagcagcaggcgccgcagctgagaccggcggccgacggccagccctcagggggcggtcacaagtcagcgcccaagcaagtcaagcgacagcgctcgtcttcgcccgaactgatgcgctgcaaacgccggctcaacttcagcggctttggctacagcctgccgcagcagcagccggccgccgtggcgcgccgcaacgagcgcgagcgcaaccgcgtcaagttggtcaacctgggctttgccacccttcgggagcacgtccccaacggcgcggccaacaagaagatgagtaaggtggagacactgcgctcggcggtcgagtacatccgcgcgctgcagcagctgctggacgagcatgacgcggtgagcgccgccttccaggcaggcgtcctgtcgcccaccatctcccccaactactccaacgacttgaactccatggccggctcgccggtctcatcctactcgtcggacgagggctcttacgacccgctcagccccgaggagcaggagcttctcgacttcaccaactggttctgaggggctcggcctggtcaggccctggtgcgaatggactttggaagcag

SEQ ID NO: 1868 - DNA, 785 bp, Homo sapiens
tctgattccgcgactccttggccgccgctgcgcatggaaagctctgccaagatggagagcggcggcgccggccagcagccccagccgcagccccagcagcccttcctgccgcccgcagcctgtttctttgccacggccgcagccgcggcggccgcagccgccgcagcggcagcgcagagcgcgcagcagcagcagcagcagcagcagcagcaggcgccgcagctgagaccggcggccgacggccagccctcagggggcggtcacaagtcagcgcccaagcaagtcaagcgacagcgctcgtcttcgcccgaactgatgcgctgcaaacgccggctcaacttcagcggctttggctacagcctgccgcagcagcagccggccgccgtggcgcgccgcaacgagcgcgagcgcaaccgcgtcaagttggtcaacctgggctttgccacccttcgggagcacgtccccaacggcgcggccaacaagaagatgagtaaggtggagacactgcgctcggcggtcgagtacatccgcgcgctgcagcagctgctggacgagcatgacgcggtgagcgccgccttccaggcaggcgtcctgtcgcccaccatctcccccaactactccaacgacttgaactccatggccggctcgccggtctcatcctactcgtcggacgagggctcttacgacccgctcagccccgaggagcaggagcttctcgacttcaccaactggttctgaggggctcggcctggtcaggccctggtgcgaatggactttggaagcag

SEQ ID NO: 1869 - protein, 236 aa, Homo sapiens
MESSAKMESGGAGQQPQPQPQQPFLPPAACFFATAAAAAAAAAAAAAQSAQQQQQQQQQQQQAPQLRPAADGQPSGGGHKSAPKQVKRQRSSSPELMRCKRRLNFSGFGYSLPQQQPAAVARRNERERNRVKLVNLGFATLREHVPNGAANKKMSKVETLRSAVEYIRALQQLLDEHDAVSAAFQAGVLSPTISPNYSNDLNSMAGSPVSSYSSDEGSYDPLSPEEQELLDFTNWF

SEQ ID NO: 1870 - protein, 236 aa, Homo sapiens; identical to SEQ ID NO: 1869

SEQ ID NO: 1871 - protein, 237 aa, Homo sapiens [sequence omitted]

SEQ ID NO: 1872 - protein, 234 aa, Homo sapiens
MESSAKMESGGAGQQPQPQPQQPFLPPAACFFATAAAAAAAAAAAAAQSAQQQQQQQQQQAPQLRPAADGQPSGGGHKSAPKQVKRQRSSSPELMRCKRRLNFSGFGYSLPQQQPAAVARRNERERNRVKLVNLGFATLREHVPNGAANKKMSKVETLRSAVEYIRALQQLLDEHDAVSAAFQAGVLSPTISPNYSNDLNSMAGSPVSSYSSDEGSYDPLSPEEQELLDFTNWF

SEQ ID NO: 1873 - DNA, 1353 bp, Homo sapiens
gcagcatgtaacctggcctgcatccaggaaatagaggacttcggatccttctaaccctaccacccaactggccccagtacattcattctctcaggaaaaaaaacaaggtccccacagcaaagaaaaggaataggatcaagagatacgtggctgctggcagagcaagcatgaattcgatgacttcagcagttccggtggccaattctgtgttggtggtggcaccccacaatggttatcctgtgaccccaggaattatgtctcacgtgcccctgtatccaaacagccagccgcaagtccacctagttcctgggaacccacctagtttggtgtcgaatgtgaatgggcagcctgtgcagaaagctctgaaagaaggcaaaaccttgggggccatccagatcatcattggcctggctcacatcggcctcggctccatcatggcgacggttctcgtaggggaatacctgtctatttcattctacggaggctttcccttctggggaggcttgtggtttatcatttcagaatctctctccgtggcagcagaaaatcagccatattcttattgcctgctgtctggcagtttgggcttgaacatcgtcagtgcaatctgctctgcagttggagtcatactcttcatcacagatctaagtattccccacccatatgcctaccccgactattatccttacgcctggggtgtgaaccctggaatggcgatttctggcgtgctgctggtcttctgcctcctggagtttggcatcgcatgcgcatcttcccactttggctgccagttggtctgctgtcaatcaagcaatgtgagtgtcatctatccaaacatctatgcagcaaacccagtgatcaccccagaaccggtgacctcaccaccaagttattccagtgagatccaagcaaataagtaaggctacagattctggaagcatctttcactgggaccaaaagaagtcctcctccctttctgggcttccataacccaggtcgttcctgttctgacagctgaggaaacgtctctcccactgtttgtactctcaccttcattcttcaattcagtctaggaaaccatgctgtttctctatcaagaagaagacagagattttaaacagatgttaaccaagagggactccctagggcacatgcatcagcacatatgtgggcatccagcctctggggccttggcacacacacattcgtgtgctctgctgcatgtgagcttgtgggttaaaggaacaaatatttagacattcaatcttcactctttcaattgtgcattcatttaataaatagatactgagcattcaaaaaaaaaaaaaaaaaaaaaaaaaaaaaaaaaaaaaa

SEQ ID NO: 1874 - protein, 250 aa, Homo sapiens
MNSMTSAVPVANSVLVVAPHNGYPVTPGIMSHVPLYPNSQPQVHLVPGNPPSLVSNVNGQPVQKALKEGKTLGAIQIIIGLAHIGLGSIMATVLVGEYLSISFYGGFPFWGGLWFIISESLSVAAENQPYSYCLLSGSLGLNIVSAICSAVGVILFITDLSIPHPYAYPDYYPYAWGVNPGMAISGVLLVFCLLEFGIACASSHFGCQLVCCQSSNVSVIYPNIYAANPVITPEPVTSPPSYSSEIQANK

SEQ ID NO: 1875 - DNA, 1155 bp, Homo sapiens
atgcatcaccatcaccatcacacggccgcgtccgataacttccagctgtcccagggtgggcagggattcgccattccgatcgggcaggcgatggcgatcgcgggccagatcaagcttcccaccgttcatatcgggcctaccgccttcctcggcttgggtgttgtcgacaacaacggcaacggcgcacgagtccaacgcgtggtcgggagcgctccggcggcaagtctcggcatctccaccggcgacgtgatcaccgcggtcgacggcgctccgatcaactcggccaccgcgatggcggacgcgcttaacgggcatcatcccggtgacgtcatctcggtgacctggcaaaccaagtcgggcggcacgcgtacagggaacgtgacattggccgagggacccccggccgaattcatgacttcagcagttccggtggccaattctgtgttggtggtggcaccccacaatggttatcctgtgaccccaggaattatgtctcacgtgcccctgtatccaaacagccagccgcaagtccacctagttcctgggaacccacctagtttggtgtcgaatgtgaatgggcagcctgtgcagaaagctctgaaagaaggcaaaaccttgggggccatccagatcatcattggcctggctcacatcggcctcggctccatcatggcgacggttctcgtaggggaatacctgtctatttcattctacggaggctttcccttctggggaggcttgtggtttatcatttcagaatctctctccgtggcagcagaaaatcagccatattcttattgcctgctgtctggcagtttgggcttgaacatcgtcagtgcaatctgctctgcagttggagtcatactcttcatcacagatctaagtattccccacccatatgcctaccccgactattatccttacgcctggggtgtgaaccctggaatggcgatttctggcgtgctgctggtcttctgcctcctggagtttggcatcgcatgcgcatcttcccactttggctgccagttggtctgctgtcaatcaagcaatgtgagtgtcatctatccaaacatctatgcagcaaacccagtgatcaccccagaaccggtgacctcaccaccaagttattccagtgagatccaagcaaataagtaa

SEQ ID NO: 1876 - protein, 384 aa, Homo sapiens [sequence omitted]

SEQ ID NO: 1877 - DNA, 861 bp, Homo sapiens
atgcatcaccatcaccatcacacggccgcgtccgataacttccagctgtcccagggtgggcagggattcgccattccgatcgggcaggcgatggcgatcgcgggccagatcaagcttatgacttcagcagttccggtggccaattctgtgttggtggtggcaccccacaatggttatcctgtgaccccaggaattatgtctcacgtgcccctgtatccaaacagccagccgcaagtccacctagttcctgggaacccacctagtttggtgtcgaatgtgaatgggcagcctgtgcagaaagctctgaaagaaggcaaaaccttgggggccatccagatcatcattggcctggctcacatcggcctcggctccatcatggcgacggttctcgtaggggaatacctgtctatttcattctacggaggctttcccttctggggaggcttgtggtttatcatttcagaatctctctccgtggcagcagaaaatcagccatattcttattgcctgctgtctggcagtttgggcttgaacatcgtcagtgcaatctgctctgcagttggagtcatactcttcatcacagatctaagtattccccacccatatgcctaccccgactattatccttacgcctggggtgtgaaccctggaatggcgatttctggcgtgctgctggtcttctgcctcctggagtttggcatcgcatgcgcatcttcccactttggctgccagttggtctgctgtcaatcaagcaatgtgagtgtcatctatccaaacatctatgcagcaaacccagtgatcaccccagaaccggtgacctcaccaccaagttattccagtgagatccaagcaaataagtaa

SEQ ID NO: 1878 - protein, 286 aa, Homo sapiens
MHHHHHHTAASDNFQLSQGGQGFAIPIGQAMAIAGQIKLMTSAVPVANSVLVVAPHNGYPVTPGIMSHVPLYPNSQPQVHLVPGNPPSLVSNVNGQPVQKALKEGKTLGAIQIIIGLAHIGLGSIMATVLVGEYLSISFYGGFPFWGGLWFIISESLSVAAENQPYSYCLLSGSLGLNIVSAICSAVGVILFITDLSIPHPYAYPDYYPYAWGVNPGMAISGVLLVFCLLEFGIACASSHFGCQLVCCQSSNVSVIYPNIYAANPVITPEPVTSPPSYSSEIQANK

SEQ ID NO: 1879 - DNA, 186 bp, Homo sapiens
atgcatcaccatcaccatcacacggccgcgtccgataacttccagctgtcccagggtgggcagggattcgccattccgatcgggcaggcgatggcgatcgcgggccagatcaagcttctaagtattccccacccatatgcctaccccgactattatccttacgcctggggtgtgaaccctggaatg

SEQ ID NO: 1880 - protein, 62 aa, Homo sapiens
MHHHHHHTAASDNFQLSQGGQGFAIPIGQAMAIAGQIKLLSIPHPYAYPDYYPYAWGVNPGM

SEQ ID NO: 1881 - DNA, 69 bp, Homo sapiens
ctaagtattccccacccatatgcctaccccgactattatccttacgcctggggtgtgaaccctggaatg

SEQ ID NO: 1882 - protein, 23 aa, Homo sapiens
LSIPHPYAYPDYYPYAWGVNPGM

SEQ ID NO: 1883 - DNA, 6799 bp, Homo sapiens
gccacgtaagaagtgtctttcgcctcccgccatgattctgaggcctccccagccatgtgcaactgcgtgtttactgctctgggcccagtgcctccctcgctcaatggagtgacggcatccaactcacaagacaggagactcaacagaatgaccaagtggagaagacgtctaagttctcagcggtctcagccgaatgactgaagaggaaccagggacagggatgactcacatgggaagaggaccccactttgttctgtttgattctaagaggacacagactgcttcattcatttcagtttccccagcacctggcttaactctcagacatgttagacggtttgtaagcaccggctctactgaactggcatcaaatcatgacctggttcagaagagacacgaggactggatctgttctaaacagattgtgcaaaggggaaagacacagactcagcatttccacagcttttaacatttcagcgagaggtgagaaagcatgtcaggaacacaggccccggccgatgaaagtgtctgatgctaacacatgaactgtcttctgctgggcacactaaggggccacaagcaagctacgccccagagccactccacattctctctgggtgcactggccctcggccacgcaaggccgcgccagcctccgaggtgagccagaaggacacacacctgtggactcgatgtccctgacttgggctcgatggccagccccagggtgactccgcccgccagcgctttcttcaggctctccttgacctccgtcagctccagctccaggctgacacgctccgcctccttctgccggcactcctcctccagctgcttcagcttctcctccaggatcgcctgcggcttcctgcctggaattcccagaaacgccgttactcccgcggcaggcacaggttctccaaacaacagagaaggcacctggtccccaagaagaacttccacaaaacgtctgaggtcgagctcccctgacttaggtcctcgttgtgaaacttaaattcagcagttctctaagggatcagagtccttctcctaccatttccctttgctgcagccgttgaggactcggaccaggaaagaggagatgctgattctgacgaaggccaggagctcctggctctgggcctcaatgttctcattttaaaacgtggaccctaaactccacagttcccaaagctgccaccttcttggagtgtgaaccctgtcctcccctaacgctccgccgatccttcagtcatcttatttgcgcccgaggcaatgaacagtagctcagcttgcatctctactggacatggcacacatttctttaaggcacattcacttattttatttgaggtttgctgcagtgacctaagatgcacccactgggcagatgagaacaccaatcccaagaggtgaacggacttgtgcccagggcctgggccggtggtggccggcaggcgaggttctctttttcaaagccaaaagcactcctggccctcctgcatcttcactatcctgcaagctgggaacacgggagaaatgctacttctgtctcattaaactccatgccccgtcccattctctggcacagcctcctcccgtagggtcagcctcagactgcaggccacatcctgggcctcctatagggtcagcccgacctgccctgccaacacctgccttccctcctctaaactccaaaagcatttcccttcatcagatcattgaggcacaaagtccagcaaggctggagctgctaaccacctgctgggtgtgcgtcagctcctccccgcgcggcgagccatgggaaggccacagcctcttctctggaccacccagggctctgaggcatctgaagcccccgtcccagcccaggccagtacaatctcaatctaaggagccagtcttccgtagtctaagcaccgggctggaagggaggccatgcgtaggtaagcggtgccaccccaggctcaggagctgagcgccagctcccgccagcaggaattgcacgcgcctggcccagggctgccactctggctgcaaactcagtttctgtgacttcagtccctctctggtgtctgtattccattagcctggcctcttccctgatgcatcccaagacagatgctgccttgctctcgcctgtcccttctcaacaaacgaggggctgcttctacccttgtctggacttctgaatattactgacccctgtgggctaccctctgtagagaaatccagctgatccctcctacccggtgaccagaatctactgcgtcctgcggatacaggggccatcctccagacaatctctgttgtcagcgccagaagccggaacaggtcccccagcacctcccctgcctcggtgagcagcgtgtgggtctggccctggcctctgcctgcacgccgcatgtttgaccacacaggcacctgcctcggggttaccagcaatgtttccaagccccaagaaacactgtgagataacccactcttactaaataaaatgacagccttggtgagcaataggtcctttgggcaaagcagaatgaaatctccagtctctaatacaaacatgcaccctgggcagtcacccacacccttcataccggcgttcacttcaatagccgctcgaaggtcttttctttccttgcggagctgggccagcctattccgcagggcctctttcctcttcagcagctcctcctctttggtctgtagccgcttggcatctgcttctacccggttcttgccatacttgtactgggcagcatcttgagaagaaaaaaaagcagcaattaaaaattaggtttactagcctgggaaatatgggacgatcccttctccacaaaaaatacaaaattagccaggcatggcggcacatgcctatagtcccagctactcaggaagctgaggtgggagaatcgcttgagcttgggagcttgaggctgcagtgagctgtgatcctgccactgtgctccagcctggatgacagtgagaccccgtgtcaaaaaaaaattaggtttattcaagcagataatggggtaactcaaaaagcctgttgaatcagccaactcagtaaacaaacacaaagcattattttgctaattcaacaagaaaaggacagggctggtatgaaccaagcagaaaagtgactagttcaaattctccaatattctttgaatcaaattcttaaaaacgaaaacagaatattaggaaattcctttaattcacttccctttgaggcacacggcttataattaatctgcaacaaggtggagaatgaacattctataatcggaaaagacaggagtaatatcaaaaataatgtctgaaatttgcttccttctctacgtcttcaaatccttccctaacaccgcagtatctgttccttatggccatgtcatctgactggctctgaattgctgctacacccccagcactgagattagcacccggcacggagtgtggcacaataaatgcttgtttagtgaataaatgaacaacggatacatgaagaggcaaccaggagcggtatctggagcctgactgtctaggaaggagtcccagcttacacttgtagctgcatgacctggaacagggcacgaatccctctgtgcctcagtttccctcatccgtgaaatggggatagtaagagcaggcaattcactgagtggttacgaggattaaatatttataaagcacttagaacaaacacaaatgggcaacacataaatgcttatttcataaaatgaataaatgaagaggaaactagctgtagggaaaatttacagacttggcaacttcacatcaccagtgaaaacagctttcaaaacctgaccccatgctctctcctattatgttggcttttcaataacagtaatttaggacaacacctctttgttaagacacatggaagagatgaaggttctaacaaaactcggatggaggatcaccgatttcaaagcttccgtggtctcccagtcgcttctaacaatcactcacgcctgaaggcaactcccaggccttcctgactgcacaccccaagtgtctgactccctcacaaggctagaaactacttcaggtagaagccacaggggtggcataatgattaagaataaaaacactggactcagagaggtggctagaaacccacactccaccctcccttgctccatgactctgcaagcaacctccggagaagctcagcttcaccctctctaaagcagaacgagaaggaatcctgtgtgtgtgtatgtgtgtgtgcgtgcgtgtgcatgcgtgttttaaattagaacgttatatctgaaaaaaatctaacaaaatgatacgacgcctgatgtagtggacattcactgacaattcttaccatatcagcgataagtgattcccagagccttgtccactcagggacagcagggagccatttctagcacctgtcctaaatgctggatttgccaattcttgcaacgtaagttatcatgatttcaatgaaatactgcatttatgaaggcataaaaagtgatcactccccagtcaattttcccctaatcaaaagaaccacatagaatgacagcaaaagcgtcggcagcctgaggagaggcgaagcattcgacaatctgaaacaaaaggatcgctgtttgcagctaaggttaacaacatatttggcaaacagggccaagtccaaactctactcgcttatttctaaactaagctgtttccccaatgaactcaatgcaatcacctataaatttccacatcttttggtccccatgtaataaatcccatctaatctataatgcaaccggctggattcaagcaaaaacacggaatgccattatttttctcttttgtcaccattagacgtcaccacagttaataaaaactccctacagaacatcccataaaataaaggaataaatcatctaggaaataaagtcagcacaggtactgacagagaaacaccatggcgattgagactccgtgggactccgattttgcttgtaacaaagctttccaggtgtgagctgctcctctcccccatctgcccctcctcaaagaaacaacactaaaagaggtgaaagtaaatacacctgatacattcaggaaataagatttgccagataaggtcaaaggaagttagtacattaaacaaatggtggtaggagggaggatttggcccaactggctccaacctatctggtcaacacgtatgttgggtagaacagaggtggagaaaagcctagatcagggatgtatacgcttccttggggcagacgcagcctggccctgcggagcgatttcaagcctcgttcacgaacatggccaaggacactgccagcctcttcattcccctgtgtggatgctccaactccaaaagtggaaccacagggcaaatgaatgtcggcacgtgtcggtatggcagcctcgctcttcgacagctggtgtgggggttaccacctggggctagctggcctcatcttcgttagcactgagactggtctaccagttgcacagattcagatttgaaaatctcaggtgcaaatcccaagtggcgatggcatgtaaccacatcaaactcaacatctgcacctaactcccaccttctttctctgggaaatcttcctggacatgcccagatggactcaggagcccatcacctgtaaatccccacactgcagccctgccacttgcttgtctgcatgtgtgggtccgctggaccactttggtgtatctttgagccccttgagtgaaaaaatgctgcctggctggctccctgattagacatccaacataatgaggactaacaccaatacaaacacttaagagatgacatatcgccctagctggatctactacagggaagggaagagggtgctgggtccaggcaggctgagtgtctcatgtcttaatgcttctctgcccaatctatttccggctggatgtggagtctgaaggcctggcacccactctggctctgtgatttaccagctgtgagccttgggggagctgcttactctcttggtgattcttttctcatttctatgatggggtagaggataatgcctatgcttacaaagtggctgtgggaagtaaaccggatgggataagaatggcttgctgtggaccacaggcaccgcaggataaccattcctcagaactcctcatactgctctagtgcttggaggtccgtgtattacctcagctattccaaccgcaccaaccacgggagccacgtgtctacgtctgacagataaagatgctgagtttagagtctgcaaggcttgacaaccacagatcagggacaggagctgaggtctcctgacctggagcccagggccacccggagctgcaagaaacctgcactcacaactgcctcctattttaaaatgctgagtcgatcccacaggtggcaaaccagttctgggcttcaatttacaagcagtcagaaaagctgggttgaaatcgccactgtccttctatgtggctgatgaggaaggatgacggtgcccaccgctccatctctccagctgaccccaagctggcactcacgggtgggcaggctcagacaggcccagctccaccaagtgcacttgaagccggaatgcaagacatccgatggtatacttactcgaacccgtccttttcacaacagccgcgggatccgctttctttggctgactgctcagagtcttcccttttcctgtgaccccattagacgccacggggggctttttacccttgagctgttgaaataaacatataagaacattaaaaataaacacaaagtcaaaaaaaaaaaaaaaaa

SEQ ID NO: 1884 - protein, 91 aa, Homo sapiens [sequence omitted]

SEQ ID NO: 1885 - protein, 56 aa, Homo sapiens
MTWFRRDTRTGSVLNRLCKGERHRLSISTAFNISARGEKACQEHRPRPMKVSDANT

SEQ ID NO: 1886 - protein, 56 aa, Homo sapiens
MLTHELSSAGHTKGPQASYAPEPLHILSGCTGPRPRKAAPASEVSQKDTHLWTRCP

SEQ ID NO: 1887 - protein, 100 aa, Homo sapiens
MASPRVTPPASAFFRLSLTSVSSSSRLTRSASFCRHSSSSCFSFSSRIACGFLPGIPRNAVTPAAGTGSPNNREGTWSPRRTSTKRLRSSSPDLGPRCET

SEQ ID NO: 1888 - protein, 195 aa, Homo sapiens [sequence omitted]

SEQ ID NO: 1889 - protein, 90 aa, Homo sapiens
MTALVSNRSFGQSRMKSPVSNTNMHPGQSPTPFIPAFTSIAARRSFLSLRSWASLFRRASFLFSSSSSLVCSRLASASTRFLPYLYWAAS

SEQ ID NO: 1890 - protein, 104 aa, Homo sapiens [sequence omitted]

SEQ ID NO: 1891 - DNA, 1450 bp, Homo sapiens
gttggtgctcagagtgtggtcaggcggctcggactgagcaggactttccttatcccagttgattgtgcagaatacactgcctgtcgcttgtcttctattcaccatggcttcttctgatatccaggtgaaagaactggagaagcgtgcctcaggccaggcttttgagctgattctcagccctcggtcaaaagaatctgttccagaattccccctttcccctccaaagaagaaggatctttccctggaggaaattcagaagaaattagaagctgcagaagaaagacgcaagtcccatgaagctgaggtcttgaagcagctggctgagaaacgagagcacgagaaagaagtgcttcagaaggcaatagaagagaacaacaacttcagtaaaatggcagaagagaaactgacccacaaaatggaagctaataaagagaaccgagaggcacaaatggctgccaaactggaacgtttgcgagagaaggataagcacattgaagaagtgcggaagaacaaagaatccaaagaccctgctgacgagactgaagctgactaatttgttctgagaactgactttctccccatccccttcctaaatatccaaagactgtactggccagtgtcattttattttttccctcctgacaaatattttagaagctaatgtaggactgtataggtagatccagatccagactgtaagatgttgttttaggggctaaaggggagaaactgaaagtgttttactctttttctaaagtgttggtctttctaatgtagctatttttcttgttgcatcttttctacttcagtacacttggtgtactgggttaatggctagtactgtattggctctgtgaaaacatatttgtgaaaagagtatgtagtggcttcttttgaactgttagatgctgaatatctgttcacttttcaatcccaattctgtcccaatcttaccagatgctactggacttgaatggttaataaaactgcacagtgctgttggtggcagtgacttcttttgagttaggttaataaatcaagccatagagcccctcctggttgatacttgttccagatggggcctttggggctggtagaaatacccaacgcacaaatgaccgcacgttctctgccccgtttcttgccccagtgtggtttgcattgtctccttccacaatgactgctttgtttggatgcctcagcccaggtcagctgttactttctttcagatgtttatttgcaaacaaccattttttgttctgtgtcccttttaaaaggcagattaaaagcacaagcgtgtttctagagaacagttgagagagaatctcaagattctacttggtggtttgcttgctctacgttacaggtggggcatgtcctcatccttcctgccataaaagctatgacacgagaatcagaatattaataaaactttatgtactgctgtagc

SEQ ID NO: 1892 - DNA, 599 bp, Homo sapiens
gggtcgaggtcgacgggtatcgataagttttttttttttttttttttaaaggagcaatgacatttcctagaagttactctaagaatttccctagagggtcgggtatcatctcagccagatctttctcatccttcaaggccctgtttggtacagcttgctaggaagctgttccagactgcagcagccctctctggggtctctctaccacttcccaggcactcagaacttgtgcctcagtagactgttttgtggcactgtcccattctctgattctccatgtgagctggttttatcccatccagcatggctgtgaaatcctaaaggttcaaaccccagccactcttcacctatatttcccccaaatggctagcacgggaaagggcccaaagtaggtgctcagtgctgatgagagagtagaatttaaataccccaggaagcattgtgagttactacggaggccatgaaatgctgccacctccccaagctgattaaagagtgatactaggaaaataggtagggaagggctaatcagaaatgcctctggttcagaagatgctgagttttaaagtccagagagccaaagaaaaaaaaaaaaaaaa

SEQ ID NO: 1893 - DNA, 8372 bp, Homo sapiens
  misc_feature 2677, 5116, 5117, 5121: n = A,T,C or G
aagcttggtgccatctattttggactatgccttgcatacagctttatgggaacatttgtcaggcaaaagtataataatggcaaactctacgccttttattttaaattagattggtgtgatttgatgctgacgggagtgagagtaatggccttatcctgctgcaggctgtgctgaggatggcctggtctgccaccctcctcgagtagcattttgcatgtgtaacagggtctcccctctggggcacaacaacaaagagaagttgctaaggacaagaagcaggtgcggaaatgcatctcccattggaacagccctgggcttactccaatggctgagagaggtgctatggccagtcctcccagagctctgcagctgcacttgggggtggacagtctcgtgcttgtcctgcgtgataacggccgtgaaagccagccaactgctgcccaaaatcacccagccgattgggggtttcccatcggcgcaccctgcccggagccaagaagacaggctggtgctgctgtatttgtatttatatccattgctgcgctctgcgttctcgtggcacgcctggacactcctccgcctccccctcctcttcctcctccagggccacctccccgccttccccacccccatctgcttctgtcaaatgagaaagtcaccgaggagaacccaaacactccagccgctgagagccccctttggcacttggcagcacgcggcggcgggctcctcggctcaacttcgaggagtctccgcgacgcaacttttggggacgctttgcatttaagagagaacgaccgaggaggaggagcgctctgcccggccgccgctacctgcggggagctcaccagcaaacgccactgcagacgaaggacccaaagaacgtaaagggcaaactgccgccgcggggagggggcaccgccgagaagttagagtgtcccagagacaacctgctcgagcgctcggccggagacactaaggcggcccggggcgcggcgtggccctggctggtcccccagccccctcctccggggcgggagcgacgccggggcgcgacgagccccggccggccgagcgggtctccgcgggcagccaacattgatttcctccgggccgagggcgagggcccgggcggcggcgggctgcagccgcggcagggcgagagcatgtccaagccggtggaccacgtcaagcggcccatgaacgccttcatggtgtggtcgcgggctcagcggcgcaagatggcccaggagaaccccaagatgcacaactcggagatcagcaagcgcttgggcgccgagtggaaactgctcacagagtcggagaagcggccgttcatcgacgaggccaagcgtctacgcgccatgcacatgaaggagcaccccgactacaagtaccggccgcggcgcaagcccaagacgctcctcaagaaggacaagttcgccttcccggtgccctacggcctgggcggcgtggcggacgccgagcaccctgcgctcaaggcgggcgccgggctgcacgcgggggcgggcggcggcctggtgcctgagtcgctgctcgccaatcccgagaaggcggccgcggccgccgccgctgccgccgcacgcgtcttcttcccgcagtcggccgctgccgccgccgctgccgccgccgccgccgccgcgggcagcccctactcgctgctcgacctgggctccaaaatggcagagatctcgtcgtcctcgtccggcctcccgtacgcgtcgtcgctgggctacccgaccgcgggcgcgggcgccttccacggcgcggcggcggcggctgcagcggcggccgccgccgccggggggcacacgcactcgcaccccagcccgggcaacccgggctacatgatcccgtgcaactgcagcgcgtggcccagccccgggctgcagccgccgctcgcctacatcctgctgccgggcatgggcaagccccagctggacccctaccccgcggcctacgctgccgcgctatgaccccgcggggccgcctcgcgaggaccggtgtgcacacgtgtacatatgtataggtacgagcgctgcggcctccccgtgcgccctcccgcgaccgggggcccggtttgtatgtacatagaatgtataggtgccaggtagaggcagagaggccaggcggggcaggagtggccaagcgcgcaagggcgcgggcgagcaggcctgtgaattcgcaggatcatttcagacccgcacttcggcagccaactcgaaagcaggcggttgtgtgcggcagcagttggcgtttgctttgcacttcggaacctgttgcgttttgacccacggaggtggaggagtaactttttgacatgttggcctttccagttttgttggaagtttcatggtcggttttgtttttgtttctcattcttcttcctcgcccctcagccccccaacccccaaccccctcccggtccgtgttgcatgcacgctgttcaaatgtgaggtctgaaatggctggcacacgggaaaagctgcttgtgtcattcgtttctgggagtgggatggctctgagcagcctcgcctccctgtttgtactatttgaactttgcagatctctgttctctcaagcagaactcccaaccagatccattcttgaccagtgaccggctcgaatctggccttttgtgtgagatgatcacggnttcttttgtttatcacgccatttgcaaatcagagcaagagctctttctcaagggcaagaaacgcaaacaagaaatatttgtgagatgaaagttgtcaattggattttcttcctaaacaaacaacaacaacaaactactagaagtctccctgagtccactcgcttggatttctgacacagtttacaaaaaaggaaaaaggcactgctcctattttcccttatggctgagttcaccttaagattgtaaatgtgtatatgtcagtgaaaacattgaggcttggaaaatgtgttattttcgttgccctaagtttgagtcgactttagactcaaaaacattttgagcgaatatcaaagttaacttttaaaaattgcgaaactatttcagaatcgcaattttatcgaagattaaatcagacttttttgtctggtaattatatatttattatttagcaaaactgaagaaaaaaagcacagaattgtttcaacagatgtctctcattttcagctagcatttctctcccaagttgagctggtttaatgtgttttggatttccctcctcaattggcttattttttagatcacctgcaattcatttgcaaattgcaataaaacacattttagaaaaaaggaaccttcaattattagctttgtttctttttaaatgtatatattttgactaatgtttgtgaatgaagttggctaacatgtatttagtttcattttggctttatgtaatataaagtttttaaaattttaaatatggttttaacctttatgtgtaaatgattttctagtgtgaccttctaatttaatattagacgtctaaggtatatctgtaaattagaatccgactatcactctgttcattttttttgaacaaagagtttaaataaagcctgaaccagggaaaagaaaaatcttctatttcttgttgagttcctaacaagatttttatctgaattgcccttacgtgcctggtccaggtgaagtgtaaggtatcctccaaaggcaccctttgtttcacttttgaatagatttactaggaaatctaaatcaagccattgttattcagagccaaaaacctgatttatcacatttttaatcgtgaataggaaagaagatttttaaaaagcccaagtcgttgtattagctttaacaacaacaaaaaaaaggcattcatgaaccagtagaacagagcccattgaaaacatccagacctttcaaagcatttcaccagtttctagtaacattttaagaggggaaagttgcttgaccactttatcttgttagttgaagagccccaccacttaaatcagtgtaatttgttctcctatctttggggtattccttgttgacaccttaaggttttatttggaaggataatcactactaacgacaaagtacaaattttggcctctttaggacttaattttgttatgctaatcgcattaaagtagaagtataacattcaaatggagagggttggatttctagggctagacaaattgctactaaagtttgaaaaatcataaaggattttaattttagacaagaaatagaagactgtcagaaaaaaaaaaataggaagatctcgcccccccgcaaccaaaatggaaattctcaagatactatatacaagtcttaaaccagtttccccattgagaccatctctggagctgcacgtctttataaacgacccaagtctttaaagtcattgttttcccccaacggaataatattttaaaaaccatgaaaagttttggaaatgtgagaaataggctctgctggtttgaccctgattcactaattaaaatgatccctctcctgttattccctgagctctttgcaatattataagttaattcatatggttctgagcgattatgcaaaactaatttggactgtccaggggtaattatccctgacacggttaattaaatcctttcaaggcttcgtctttcccttttgtagcagcccatcccttctcaacacggaacttctgcggctcgctggaaatcaccccagccctaaatcttagttaccaccctgagccttccagctcggccgcctcctcggcctgaagactccccgcctcctcccgccccctccccttttcccaaagatcagcgttttctgggagaaacgctccggagttgttgatgaatgagaagaggactggaaagatgggtaagaggaggggtgaggatgccgagggggagcaccgaggtcatatcgccaacagattgtgcggctgtttgaggacctccacaggccccacagactcgtttatcacccattctgactccaatggtcttgctaacaagttggcgggttttgcgcctgcagagagcctcctgccaagttagactgtgcagaagtaaggggttggagcggggggagcggctccggggcaagagggcgtagagaaaggcccggggnngggnggtgtaagcgtctgaaagtggcccacaaatgcagcgctgtgattgggcagagagctgctgctggctcgcgatctctatctccatctctttatctatctccgtctctctccctgtttctccatttttctttctttccttctctctccttccttccttccatctttcttctttcccttccttttattcttctattttcgtttcttttcaaggttttttttaaagccatgatgcaatttctttggtattcaccgttgtcccaaaacttgaagcaagcctcgtatccaaggggccaggcatgttgcttcgggctttgtgcaaacaggtggaattgcgctgtgtaagcagtaagaactggtgctggggagctgtcgcgcgagggggtggctttgggagagcagggttgctggccgcgattgttacttcccttgacaatttcctcctccccctcccccaagaagataggagaaagcaccgcggatctccctctcaccccaggctcggggcgcagaagatggagagaagattccactctccccggagcagatagggacggtcgcgccagccaatcagagcgcggctcggcgccggcgctcccggccgcctgggccgccgtgtcctccaggcaagcgaagttcccgcaactcgtccgcctcgagggtccgcgtctttcttgcgcccgcggcccagcggaggccgagggagccgtccaaactttattaatctctcctcctttctttctccctcagcccagtgcatctcaaaggtcagccctcttcttttaaaagactgatattattaatgcactgacaattcctcccccccttttcttttttctctcttgcaggggggaaaaaaagggaaatggtgaaaagagctttttttatcctttttttttttttgtccttcagtgggagcgtttagacagtcgaggaggttttgtccgagaacaaaacgcagggttgggaggttttgtgagagtgttgtttgttgaagtggagctaagaaaaagcggcggctttctcctcattgtgaagaaaccaatcagtggtatttggaaaactgttagcattgtgcacttcttctgtgtccattgtgaggcgtttcttttcacaaggtttttttttcagccgatccagctggccggaatgaatagcggtgcaatgtgtacacgctttgtccctccggccttcaagtagcccccattgaatagactaagttgacctgcgtgacagtgaaacaacataataaaaaatacatgagcccctgaataggagcaggcgcataaataaataaaatgggtgaccaaaactggataaactgaatgacaaaacggtgaaaggggaacaaaaagatatttaacacgctagattagcattagaatgcgatctacaaggcagaacaattgatgaataggtttaccggccaagaaagaaatggactaaatgccctttgaatagatatgctttttgcaagggctttgaatagatatgcttttgcaagggctgaatgggaaaaggtaaagatgaagctatgcaaatgagccggggaactttttatatatattctttaaacacacacacacactgcggggggaagagtgctgcctcgggatgtttatagaagcaataattgccattattagcattgtctgcggcagatagaaattgaacaggttgggataatatagggtagcagtaattattcttctaattaatggtcctttgctacttgaaaaaagaaaaaaggaaagaagtagtaaaagttatgcagaagttatgtttccttgtgtccatttgcccagcgctggaatctgtggagcaggaagcctggcaattccaagatacgcgatgatcytcaaacattcccgggagccagtcctgaggctctggcttcagggcctagtttccatttatgccgcgtttttgagagtctaatactgtgtctggcacatggtaggtgctcactgaatagtcgtggtatgaatgaatgaacgaatgaatgaatgaatgaatgaatataagtttaatgggggaaacccgggcctcctaataaaggtaggggctgggggatacctaggggcttccccaggaggatttcttttttcatcatcccacccctgggagaaaggtccacgcaggatggtcgcttcccccttgctgagagttttgccttcagcctatctgggccgctggaaaagaggagaagaataaacaagagacaagcaactactcccctaccggcgttccgtccttgtcctcactgccaaatccactccaaagccgaggatggtgagactgtgaagttgcaaagaaacacagagcccacccccttaaagaattacgatatatttaaagtttgcctctttcaggtttctctccttggctcctgcccctttcccctcccggctccttgtccttgactgaacctcatgggacagagaacctcctgtcccccacgaggcaaggcgcgaacccgcagagatctggggtgccctttggttccctgcgctgccctggaggcgtccatagaggcctttgccgccaaggacagcaattgttttattttcgatggttgctcgccaggctgcgggtcgcgggcccacccagccgtcgaactttccagtcgttatcagcgctgctcctaacttaatggaataatgcaaattatagcctgcccagctgacacgtccctgcgaatgcgccggggctgagctctggccagccgctctctcgacgtcctggacggccggagggaatgaagctctgaattgtgacaaaagtggggggggcaccccaaattctcaaagcaatgttcttttttttttcttttttcttaagcaattgagccttaccaaatgtcggggccggccgcacggaagccttgcatattttaaagtgtaacctgagccttcgcggtttcagcttcacttaaaacatgcaaattcttgaaattgaaaaatctgaaaaacttccgaagagttctatctgaataaatccaaatccattgggagtcgctttgaggagacaaaacgcacagcgatttggggtgagggatatttgtggggaggcaggacgtgctggattgggtttccagggtcaaggtgtctctgggccttcgacgatagccttagcgcagagcagggaagtggcaccgctaggcagcaagctcagttgctctacttttgtgacccatccccccaccccccccaccgccacccttgcctccgggccactgcccctctctgcaagctt

SEQ ID NO: 1894 - DNA, 6942 bp, Homo sapiens
ggcatggaacctaaagactagaggcggttgtgtgagtcaggaagaggggccagatatctgagtgttcctctttagtttcttcaattgcagataatatggtgtctaattttatgttgttcaggaaagacagtggttcctgactcaggaagacagtctcagaaacatgtggaatgatattgagctgctaacaaatgatgataccggaagtgggtacctgagtgtcggttcaagaaaagaacatggaactgctttatatcaagtagatttgctagtgaagatctcttctgaaaaggcctcattaaatccaaagatacaggcatgcagcttaagtgatgggtttattattgtagccgaccaatcagtgatattgcttgacagtatttgtagatcacttcaattgcatcttgtctttgatactgaagtggatgtagttggcctttgtcaagaaggaaagtttcttttggttggcgagagaagtggcaacctacatcttattcatgtaacatcaaaacaaacactactcactaatgcatttgttcagaaagctaacgatgaaaatcggcggacttaccagaatcttgtcattgagaaggatggttcaaatgaaggtacctattatatgctacttcttacatacagtggatttttttgtattacaaaccttcagcttttaaaaattcaacaagcaattgagaatgtagacttcagtacagcaaaaaagttacaaggacaaatcaagtccagttttatttctactgaaaattatcatactcttggttgtctcagtcttgtggctggagatttagcaagtgaagttcctgtgataattgggggaaccggtaattgtgcattctcaaaatgggaaccagattcttccaagaaaggaatgacagttaagaaccttattgatgcagagattattaaaggtgcaaagaagttccagctgatagacaatctactttttgttcttgatactgataacgtgctgagtttatgggatatttacactctaactcctgtatggaactggccctctcttcacgtagaagagtttcttcttactacagaagcagactctccttcatcagtcacgtggcaaggaattacaaatctcaaattaatagctctgacagcttcagctaataagaagatgaaaaacctcatggtttattcattacctacaatggaaatactatattctttggaagtatctagtgtttcttctctggtccaaacaggaattagcacagataccatataccttttagaaggagtttgcaaaaatgatccaaaattgtctgaagactcagtctctgtgttagtactcagatgtcttacggaagctttaccagaaaacagattgagtcggttacttcacaaacacagatttgctgaagctgagagttttgccattcagtttggactagatgttgagcttgtttacaaggtcaagtcaaatcatatattggagaaactggcattgagttctgtggatgccagtgaacagaccgaatggcaacaacttgtagacgacgctaaggaaaatctacataagatccaggatgatgaatttgtggtgaattactgcctgaaagctcagtggataacctatgaaaccactcaagagatgctgaattatgccaaaaccaggcttttgaagaaagaagataaaactgctctcatttattctgatggcttgaaagaggtgctaagagctcatgcaaaattgactactttttatggagcatttggaccagaaaaattcagtggcagttcttggattgaatttctaaataatgaagatgatcttaaagatatttttttacagctaaaagaaggaaaccttgtttgtgcacagtatctttggcttcgacatcgggcaaactttgaaagcagatttgatgtgaaaatgctggagagcttgctcaactcaatgtctgcatcagtctctttgcaaaagctgtgtccatggtttaaaaatgatgtgattccatttgtaagaaggactgtgcctgaaggacagataattcttgcaaaatggttggaacaagcagccaggaaccttgaattaactgataaggcaaattggccagaaaatggacttcaattggcagagatattttttacagcagaaaaaacagacgagttgggattggcatcttcctggcattggatttccttgaaagattatcagaacacagaggaagtatgtcagctaaggactttggtaaataacttgcgagagttgatcacgttgcataggaagtacaactgcaaattagccctctctgattttgagaaggaaaatacaaccaccatagtgttccgaatgtttgataaagtgctggccccagagcttattccctccatcttagagaagtttataagagtttacatgagagaacatgacttgcaagaggaggaacttctcttgctgtacatagaggatttactgaatagatgcagctcaaagtccacatcactctttgaaacagcatgggaagcaaaggccatggcagtaatagcgtgtttatctgacacggacctcatatttgatgccgtgctcaagatcatgtatgcggcagtggttccttggagtgcagctgtggagcaactggtgaaacagcacctggaaatggaccatcccaaagtcaagttattacaggaaagttacaaactaatggagatgaaaaaacttttacgaggctatggaataagagaggtaaatctcttaaacaaggaaataatgagagtggttagatacattctcaaacaagatgtcccatcttctttagaagatgctttaaaggtagcccaagcgtttatgttatctgatgatgagatctacagtctaagaattattgacctgattgatagagaacagggtgaagactgtctccttctgttgaagtctttgcctcctgctgaagctgagaaaactgcagaaagagtcatcatatgggcacgactggcattacaagaagagccagatcattctaaagagggcaaggcctggagaatgtctgtagcgaagacatccgtggacattcttaagatactatgtgacattcagaaagacaatctgcagaagaaggacgaatgtgaagaaatgttgaaactatttaaagaggttgctagcttacaggagaactttgaggtctttctttcatttgaagattatagcaatagttccctggtagcagatctccgtgagcagcacattaaagctcacgaagttgcacaggcgaaacacaaacctgggagcaccccagagcccatagctgctgaggtgaggagcccaagcatggaatcaaagctgcacagacaggcactggccctgcagatgtccaaacaagagctggaggcagagctgaccttgagagccttaaaagatgggaacatcaaaacagcactgaaaaaatgcagcgacttgtttaagtatcactgcaatgctgacactgggaaattgctatttctgacatgtcagaagctttgtcagatgttggctgataatgtcccagtgacagtgcctgtgggactgaatcttccttccatgatacatgatctagcaagccaagctgccaccatttgcagtccagattttttactagatgctttagaactatgtaaacatactttaatggctgtagagctttccagacaatgccaaatggatgactgtggaatcctcatgaaagcttcttttgggacacataaagatccatatgaagagtggtcttacagtgacttcttcagtgaagatggaattgttcttgagtcacagatggtgcttccagtgatttatgaactgatttcatctcttgtgcctctagctgaaagcaagagatatcccttggagtctaccagtttgccatactgctcccttaatgaaggagatggccttgttttacctgttataaattccatctctgccctgcttcagaatcttcaggaatctagccagtgggagctagccctaagatttgtggttggttcatttggtacctgtcttcagcactctgtgtcaaacttcatgaatgccactttgagtgaaaagttatttggagagactacattagttaaatcaaggcatgttgttatggaattgaaagaaaaagctgttatatttatcagggaaaatgctacaacactactgcacaaagtatttaattgtcgcttggtagatcttgacctggcgttgggttactgcactctcttacctcaaaaagatgtgtttgaaaatctctggaagctcatagataaagcatggcagaattacgacaaaatcttggcaatatctctggtgggctctgagctggcaagtctctatcaggaaatagaaatggggcttaagttccgtgaactcagtactgatgcccagtggggcattcgtcttggtaaacttggtatttcttttcaaccagttttcaggcaacattttctcaccaagaaagacctcattaaagctcttgtggagaatatagatatggacacaagcctcattttggaatattgcagcacatttcagttggactgcgatgcagttcttcagctcttcattgaaacgctgctccacaacacaaatgccggccaaggccagggagatgcaagcatggactctgcaaagcggcggcatcccaaactcctggccaaagcccttgagatggttcctttactgacgagcacaaaagatttggtcatcagtcttagtggaatactacataagctggatccttatgactatgaaatgattgaagttgtcttgaaagttatagaacgagctgatgaaaagataaccaatattaatattaatcaggcattgagtattctgaaacatttgaagtcatacagaagaatttctcctcccgtggatctagaatatcagtatatgttggaacatgtcataactttgccatcagctgcccaaactagactgccttttcacctgatattctttggcacagcacagaacttctggaaaattctctctacagaactcagtgaagaatctttcccaacattgctcttaatttcgaaattaatgaagttctctctggacactctgtacgtgtctacagcaaaacacgttttcgaaaaaaaactgaagccaaagctcctgaagttaacacaagctaaatcctcaacactgattaacaaggaaataactaagatcacgcagaccatcgaatcctgcttactctctatagtcaacccagagtgggctgtagctattgccatcagccttgcccaggatatccctgaaggttccttcaagatatctgctttgaaattctgcctttatttagctgagagatggctacagaatatcccatcgcaggacgaaaaacgtgaaaaagccgaggctttgttgaagaagcttcatatccagtaccggcgatcgggcacagaagctgtgctcatagcccacaagctgaacactgaggaatatttaagagtgatcggaaagccagcacatcttattgtcagtctctacgaacatcctagcatcaatcaaagaattcagaattcatctggcacagattatcctgatattcatgcagcagctaaagaaatagccgaagtcaatgaaattaatttggaaaaagtctgggacatgttgttggaaaaatggctatgcccttcaacaaaacctggtgaaaaaccatcagaattatttgaacttcaagaagatgaagccctacgaagagtgcagtatctcctcctgtctcgtccaattgattatagttcaagaatgctgtttgtatttgcaacatcaactacaaccacattaggtatgcatcagttaacttttgcccatagaactcgagctcttcagtgtctcttctatttggctgacaaggaaactatagaatctctctttaaaaaacccattgaagaagtgaaatcttatttgagatgtataacttttctggcatcatttgagactttgaatatccccatcacatatgaattattttgcagcagtcctaaagaaggaatgattaagggtctgtggaaaaaccacagccacgagtccatggcagtaagattggtgactgagctgtgtttagaatacaaaatctatgacctgcagctttggaatggactcttgcaaaagcttctgggcttcaatatgattccttatctaaggaaagttttaaaagccatctccagtatccattctttatggcaggttccctacttcagcaaagcgtggcagcgtgtgatacagataccactgctttcagcctcttgtcctttaagtcctgatcagctgtcagattgttctgagagtctcatcgctgtcctcgaatgtccagtctcaggtgatcttgacctgatcggagtcgccaggcagtatatccagttagaacttccggcttttgcattagcttgtctgatgctcatgccccactcagagaaaagacaccagcaaattaagaattttctgggttcctgtgaccctcaggttattttaaagcaattggaagagcatatgaacacgggccagctagcaggattttcacatcaaattagaagtctgattttgaataatatcatcaataagaaggagtttgggattttggcaaagaccaaatactttcaaatgttgaagatgcatgcgatgaataccaacaatatcactgagctagtgaactatttggcaaatgacttaagtttagatgaagcttcagtcttgataactgaatattcaaagcactgcgggaaacctgtgcctccagacactgctccctgtgaaattctgaagatgtttcttagtggattatcgtaaatcactgaacctttttttcaagaaggacaagaattttggagtctgctattaatggaccatatttattacagtttttaaattgtacaatctctgtattatagctatttgtctaacattaccccacatgtaataaataaaacaatatgagc

SEQ ID NO: 1895 - DNA, 884 bp, Homo sapiens
ttgctgcgttgtgaggggtgtcagctcagtgcatcccaggcagctcttagtgtggagcagtgaactgtgtgtggttccttctacttggggatcatgcagagagcttcacgtctgaagagagagctgcacatgttagccacagagccacccccaggcatcacatgttggcaagataaagaccaaatggatgacctgcgagctcaaatattaggtggagccaacacaccttatgagaaaggtgtttttaagctagaagttatcattcctgagaggtacccatttgaacctcctcagatccgatttctcactccaatttatcatccaaacattgattctgctggaaggatttgtctggatgttctcaaattgccaccaaaaggtgcttggagaccatccctcaacatcgcaactgtgttgacctctattcagctgctcatgtcagaacccaaccctgatgacccgctcatggctgacatatcctcagaatttaaatataataagccagccttcctcaagaatgccagacagtggacagagaagcatgcaagacagaaacaaaaggctgatgaggaagagatgcttgataatctaccagaggctggtgactccagagtacacaactcaacacagaaaaggaaggccagtcagctagtaggcatagaaaagaaatttcatcctgatgtttaggggacttgtcctggttcatcttagttaatgtgttctttgccaaggtgatctaagttgcctaccttgaatttttttttaaatatatttgatgacataatttttgtgtagtttatttatcttgtacatatgtattttgaaatcttttaaacctgaaaaataaatagtcatttaatgttgaaaaaaaaaaaaaaaaaaaa

SEQ ID NO: 1896 - DNA, 787 bp, Homo sapiens
gtgtggacactcctaggatagaaagtttggtatgttgctatacctttgcttctcccaccttccccaatatctaatatgtatttctcattcttagaataatccagaatggctactctgatctatgttgataaggaaaatggagaaccaggcacccgtgtggttgctaaggatgggctgaagctggggtctggaccttcaatcaaagccttagatgggagatctcaagtttcaacaccacgttttggcaaaacgttcgatgccccaccagccttacctaaagctactagaaaggctttgggaactgtcaacagagctacagaaaagtctgtaaagaccaagggacccctcaaacaaaaacagccaagcttttctgccaaaaagatgactgagaagactgttaaagcaaaaagctctgttcctgcctcagatgatgcctatccagaaatagaaaaattctttcccttcaatcctctagactttgagagttttgacctgcctgaagagcaccagattgcgcacctccccttgagtggagtgcctctcatgatccttgacgaggagagagagcttgaaaagctgtttcagctgggccccccttcacctgtgaagatgccctctccaccatgggaatccaatctgttgcagtctccttcaagcattctgtcgaccctggatgttgaattgccacctgtttgctgtgacatagatatttaaatttcttagtgcttcagagtttgtgtgtatttgtattaataaagcattctttaacagaaaaaaaaaaaaaaaa

SEQ ID NO: 1897 - DNA, 1838 bp, Homo sapiens
gtcgacggctggtttgaaaagtgacaacggccggtggattttaggagtttgctcggtttgtaactgctctttggtgagctactgggactgcagactaggaggagactcccaaaatggaaactctgtccttccccagatacaacatagctgagattgtagttcatattcgcaataaactgttaactggagcggatggcaaaaacctctccaagagcgattttcttccaaacccgaagcctgaagtcctgtacatgatttacatgagagccttacagttagtgtatggggtccggctggagcatttctacatgatgccggtgaacatagaagtcatgtatccacatataatggagggcttcttaccggtcagcaatttgttcttccacctggactcgtttatgcccatttgccgggtgaatgactttgagatcgccgatattctttatccaaaagcaaaccggacaagtcgttttttaagtggcattatcaactttattcacttcagagaaacatgcctggagaagtatgaagaatttcttttgcaaaataaatcctctgtggacaaaatacagcagttaagcaatgcacaccaggaagcattgatgaaactggaaaaactcaattcggttcccgtggaggagcaggaagagttcaaacagctgaaggatgacatccaggagctgcagcacttgctgaatcaagacttcagacagaaaacgacactgctgcaggagagatataccaaaatgaaatcagatttttcagagaaaaccaagcatgttaatgagctaaagttgtcagtagtttctttgaaagaagttcaagacagtttgaaaagcaaaattgtggattctccagagaagctgaagaactataaagagaagatgaaggacaccgtccagaagctccgcagtgccagggaagaagtgatggagaagtatgatatctatagagattctgtggattgcttgccttcctgtcagctggaggtgcagttatatcaaaagaaatcacaggaccttgcagataatagggagaaactaagcagtatcttaaaggagagcctgaacctggagggccagattgatagtgattcatcagaactaaagaaactgaagactgaagagaactccctcataagactgatgactctaaagaaggagagacttgctaccatgcagttcaaaataaacaagaagcaggaggatgtgaaacagtacaagcggaccatgattgaagattgcaataaagttcaagaaaaaagagatgctgtctgcgagcaagtaaccgccattaatcaagacatccacaagattaaatctgggattcagcagctaagagacgccgaaaaacgggagaaactgaagtctcaggaaatcttggtagacttgaaaagtgctttggagaagtaccatgagggcatcgagaagacgacggaggagtgctgcactagaataggagggaagactgccgagctgaagaggaggatgttcaaaatgccgccctgatcaacagccacccgaaaatggcctttcgctttctgtttggagtagttatattgaagctaatagaaggaccgcagtctcagctaactagcgtgggtaccattggttctctgtccttttatgaccatgtgctccctgtgtttttttcttggtgatggggatacaactcagggccttgcaggctacactgacttgcctccctaggctctaatgtaccatgtactatgtaggcttttgctacaattaaagtaacgtgtacagcttttatgtccctactctgtctccttttgtatgtgctggttggaataaacaaatagttactgacgtcaaaaa

SEQ ID NO: 1898 - DNA, 2103 bp, Homo sapiens
ctctgccgagcctccttaaaactctgccgttaaaatgggggcgggtttttcaactcaaaaagcgctcaatttttttcttttcaaaaaaagctgatgaggtcggaaaaaagggagaagaaaccggcaccctctctgagaggcaacagaagcagcaattgtttcagcgaaaaaagcagcaagggagggagtgaaggaaaaaagcaaaaaagggggcgacacgcaagtgcctgtaggggtgaaaggagcagggaccggcgatctagggggggatcagctacaaaagaaactgtcactgggagcggtgcggccaaggaggaagcagtgctgccaggctctgctccagggcacagctggctggcggctgccctgtccgcagcaaaggggcacaggccggggaccgcgagaggtggcaaagtggcaccgggcgccgaggctgctgagcgctcgccgagacgcggaccggactggctgccccggaactgcggcgactctccctactcagaacttggcctacgtttcccaggactctccccatctccagaggcccccacaaaaccgggaaaggaaggaaaggacagcggcggcagcagctcaatgagtgcctacagcagaaagcctgaacgagctcggtcgtaggcgggaagttcccgggggctgcccagtgcagccgcaatgctgccgcgagctgccccagcagtccgggctccgtagacgctttccgcatcactctccttcctcgggctgccgggagtcccgggacctggcggggccggcatgacgggcttctcgggggcccgccgcacgcccggcagcctccggagacgcgcgccgagcccggctcccacggcctctgaggctcggcggggctgcggctgcctggcgggcgggctccggagctttcctgagccggcattagcccacggcttggcccggacgcgaccaaaggctcttctggagaagcccagagcactgggcaatcgttacgacctgtaacttgagggccaccgaactgctactcccgttcgcctttggcgatcatcttttaaccctccggagcacgtcagcatccagccaccgcggcgctctcccagcagcggaggacccaggactatcccttcggcgagacggatggaaaccgagccccctggaggacctgcccctgcagttctgcctcacacggctcaagtcaccaccgtgaacaagggaccctaaagaatggccgagccttgggggaacgagttggcgtccgcagctgccaggggggacctagagcaacttactagtttgttgcaaaataatgtaaacgtcaatgcacaaaatggatttggaaggactgcgctgcaggttatgaaacttggaaatcccgagattgccaggagactgctacttagaggtgctaatcccgatttgaaagaccgaactggtttcgctgtcattcatgatgcggccagagcaggtttcctggacactttacagactttgctggagtttcaagctgatgttaacatcgaggataatgaagggaacctgcccttgcacttggctgccaaagaaggtcacctccgggtggtggagttcctggtgaagcacacggccagcaatgtggggcatcggaaccataagggggacaccgcctgtgatttggccaggctctatgggaggaatgaggttgttagcctgatgcaggcaaacggggctgggggagccacaaatcttcaataaacgtggggagggctcccccacgttgcctctactttatcaattaactgagtagctctcctgacttttaatgtcatttgttaaaatacagttctgtcatatgttaagcagctaaattttctgaaactgcataagtgaaaatcttacaacaggtttatgaatatatttaagcaacatctttttaacctgcaaaatctgttctaacatgtaattgcagataactttgactttcttctgaatattttatctttccttggcttttcccttgcttccccttttgccaatctcaacacccaagttgaagactttgtttttaaaatggtttgtcctgatgcttttgtctaattaaaacactttcaaaacaggaaaaaaaaaaaaaaaaaa

SEQ ID NO: 1899 - DNA, 987 bp, Homo sapiens
cggagagggggagaacagacaacgggcggcggggagcagcatggagccggcggcggggagcagcatggagccttcggctgactggctggccacggccgcggcccggggtcgggtagaggaggtgcgggcgctgctggaggcgggggcgctgcccaacgcaccgaatagttacggtcggaggccgatccaggtcatgatgatgggcagcgcccgagtggcggagctgctgctgctccacggcgcggagcccaactgcgccgaccccgccactctcacccgacccgtgcacgacgctgcccgggagggcttcctggacacgctggtggtgctgcaccgggccggggcgcggctggacgtgcgcgatgcctggggccgtctgcccgtggacctggctgaggagctgggccatcgcgatgtcgcacggtacctgcgcgcggctgcggggggcaccagaggcagtaaccatgcccgcatagatgccgcggaaggtccctcagacatccccgattgaaagaaccagagaggctctgagaaacctcgggaaacttagatcatcagtcaccgaaggtcctacagggccacaactgcccccgccacaacccaccccgctttcgtagttttcatttagaaaatagagcttttaaaaatgtcctgccttttaacgtagatataagccttcccccactaccgtaaatgtccatttatatcattttttatatattcttataaaaatgtaaaaaagaaaaacaccgcttctgccttttcactgtgttggagttttctggagtgagcactcacgccctaagcgcacattcatgtgggcatttcttgcgagcctcgcagcctccggaagctgtcgacttcatgacaagcattttgtgaactagggaagctcaggggggttactggcttctcttgagtcacactgctagcaaatggcagaaccaaagctcaaataaaaataaaataattttcattcattcactc

SEQ ID NO: 1900 - DNA, 2545 bp, Homo sapiens
atccaatacaggagtgacttggaactccattctatcactatgaagaaaagtggtgttcttttcctcttgggcatcatcttgctggttctgattggagtgcaaggaaccccagtagtgagaaagggtcgctgttcctgcatcagcaccaaccaagggactatccacctacaatccttgaaagaccttaaacaatttgccccaagcccttcctgcgagaaaattgaaatcattgctacactgaagaatggagttcaaacatgtctaaacccagattcagcagatgtgaaggaactgattaaaaagtgggagaaacaggtcagccaaaagaaaaagcaaaagaatgggaaaaaacatcaaaaaaagaaagttctgaaagttcgaaaatctcaacgttctcgtcaaaagaagactacataagagaccacttcaccaataagtattctgtgttaaaaatgttctattttaattataccgctatcattccaaaggaggatggcatataatacaaaggcttattaatttgactagaaaatttaaaacattactctgaaattgtaactaaagttagaaagttgattttaagaatccaaacgttaagaattgttaaaggctatgattgtctttgttcttctaccacccaccagttgaatttcatcatgcttaaggccatgattttagcaatacccatgtctacacagatgttcacccaaccacatcccactcacaacagctgcctggaagagcagccctaggcttccacgtactgcagcctccagagagtatctgaggcacatgtcagcaagtcctaagcctgttagcatgctggtgagccaagcagtttgaaattgagctggacctcaccaagctgctgtggccatcaacctctgtatttgaatcagcctacaggcctcacacacaatgtgtctgagagattcatgctgattgttattgggtatcaccactggagatcaccagtgtgtggctttcagagcctcctttctggctttggaagccatgtgattccatcttgcccgctcaggctgaccactttatttctttttgttcccctttgcttcattcaagtcagctcttctccatcctaccacaatgcagtgcctttcttctctccagtgcacctgtcatatgctctgatttatctgagtcaactcctttctcatcttgtccccaacaccccacagaagtgctttcttctcccaattcatcctcactcagtccagcttagttcaagtcctgcctcttaaataaacctttttggacacacaaattatcttaaaactcctgtttcacttggttcagtaccacatgggtgaacactcaatggttaactaattcttgggtgtttatcctatctctccaaccagattgtcagctccttgagggcaagagccacagtatatttccctgtttcttccacagtgcctaataatactgtggaactaggttttaataattttttaattgatgttgttatgggcaggatggcaaccagaccattgtctcagagcaggtgctggctctttcctggctactccatgttggctagcctctggtaacctcttacttattatcttcaggacactcactacagggaccagggatgatgcaacatccttgtctttttatgacaggatgtttgctcagcttctccaacaataagaagcacgtggtaaaacacttgcggatattctggactgtttttaaaaaatatacagtttaccgaaaatcatataatcttacaatgaaaaggactttatagatcagccagtgaccaaccttttcccaaccatacaaaaattccttttcccgaaggaaaagggctttctcaataagcctcagctttctaagatctaacaagatagccaccgagatccttatcgaaactcattttaggcaaatatgagttttattgtccgtttacttgtttcagagtttgtattgtgattatcaattaccacaccatctcccatgaagaaagggaacggtgaagtactaagcgctagaggaagcagccaagtcggttagtggaagcatgattggtgcccagttagcctctgcaggatgtggaaacctccttccaggggaggttcagtgaattgtgtaggagaggttgtctgtggccagaatttaaacctatactcactttcccaaattgaatcactgctcacactgctgatgatttagagtgctgtccggtggagatcccacccgaacgtcttatctaatcatgaaactccctagttccttcatgtaacttccctgaaaaatctaagtgtttcataaatttgagagtctgtgacccacttaccttgcatctcacaggtagacagtatataactaacaaccaaagactacatattgtcactgacacacacgttataatcatttatcatatatatacatacatgcatacactctcaaagcaaataatttttcacttcaaaacagtattgacttgtataccttgtaatttgaaatattttctttgttaaaatagaatggtatcaataaatagaccattaatcag

SEQ ID NO: 1901 - protein, 149 aa, Homo sapiens
MASSDIQVKELEKRASGQAFELILSPRSKESVPEFPLSPPKKKDLSLEEIQKKLEAAEERRKSHEAEVLKQLAEKREHEKEVLQKAIEENNNFSKMAEEKLTHKMEANKENREAQMAAKLERLREKDKHIEEVRKNKESKDPADETEAD

SEQ ID NO: 1902 - protein, 276 aa, Homo sapiens
MSKPVDHVKRPMNAFMVWSRAQRRKMAQENPKMHNSEISKRLGAEWKLLTESEKRPFIDEAKRLRAMHMKEHPDYKYRPRRKPKTLLKKDKFAFPVPYGLGGVADAEHPALKAGAGLHAGAGGGLVPESLLANPEKAAAAAAAAAARVFFPQSAAAAAAAAAAAAAGSPYSLLDLGSKMAEISSSSSGLPYASSLGYPTAGAGAFHGAAAAAAAAAAAAGGHTHSHPSPGNPGYMIPCNCSAWPSPGLQPPLAYILLPGMGKPQLDPYPAAYAAAL

SEQ ID NO: 1903 - protein, 2209 aa, Homo sapiens
MWNDIELLTNDDTGSGYLSVGSRKEHGTALYQVDLLVKISSEKASLNPKIQACSLSDGFIIVADQSVILLDSICRSLQLHLVFDTEVDVVGLCQEGKFLLVGERSGNLHLIHVTSKQTLLTNAFVQKANDENRRTYQNLVIEKDGSNEGTYYMLLLTYSGFFCITNLQLLKIQQAIENVDFSTAKKLQGQIKSSFISTENYHTLGCLSLVAGDLASEVPVIIGGTGNCAFSKWEPDSSKKGMTVKNLIDAEIIKGAKKFQLIDNLLFVLDTDNVLSLWDIYTLTPVWNWPSLHVEEFLLTTEADSPSSVTWQGITNLKLIALTASANKKMKNLMVYSLPTMEILYSLEVSSVSSLVQTGISTDTIYLLEGVCKNDPKLSEDSVSVLVLRCLTEALPENRLSRLLHKHRFAEAESFAIQFGLDVELVYKVKSNHILEKLALSSVDASEQTEWQQLVDDAKENLHKIQDDEFVVNYCLKAQWITYETTQEMLNYAKTRLLKKEDKTALIYSDGLKEVLRAHAKLTTFYGAFGPEKFSGSSWIEFLNNEDDLKDIFLQLKEGNLVCAQYLWLRHRANFESRFDVKMLESLLNSMSASVSLQKLCPWFKNDVIPFVRRTVPEGQIILAKWLEQAARNLELTDKANWPENGLQLAEIFFTAEKTDELGLASSWHWISLKDYQNTEEVCQLRTLVNNLRELITLHRKYNCKLALSDFEKENTTTIVFRMFDKVLAPELIPSILEKFIRVYMREHDLQEEELLLLYIEDLLNRCSSKSTSLFETAWEAKAMAVIACLSDTDLIFDAVLKIMYAAVVPWSAAVEQLVKQHLEMDHPKVKLLQESYKLMEMKKLLRGYGIREVNLLNKEIMRVVRYILKQDVPSSLEDALKVAQAFMLSDDEIYSLRIIDLIDREQGEDCLLLLKSLPPAEAEKTAERVIIWARLALQEEPDHSKEGKAWRMSVAKTSVDILKILCDIQKDNLQKKDECEEMLKLFKEVASLQENFEVFLSFEDYSNSSLVADLREQHIKAHEVAQAKHKPGSTPEPIAAEVRSPSMESKLHRQALALQMSKQELEAELTLRALKDGNIKTALKKCSDLFKYHCNADTGKLLFLTCQKLCQMLADNVPVTVPVGLNLPSMIHDLASQAATICSPDFLLDALELCKHTLMAVELSRQCQMDDCGILMKASFGTHKDPYEEWSYSDFFSEDGIVLESQMVLPVIYELISSLVPLAESKRYPLESTSLPYCSLNEGDGLVLPVINSISALLQNLQESSQWELALRFVVGSFGTCLQHSVSNFMNATLSEKLFGETTLVKSRHVVMELKEKAVIFIRENATTLLHKVFNCRLVDLDLALGYCTLLPQKDVFENLWKLIDKAWQNYDKILAISLVGSELASLYQEIEMGLKFRELSTDAQWGIRLGKLGISFQPVFRQHFLTKKDLIKALVENIDMDTSLILEYCSTFQLDCDAVLQLFIETLLHNTNAGQGQGDASMDSAKRRHPKLLAKALEMVPLLTSTKDLVISLSGILHKLDPYDYEMIEVVLKVIERADEKITNININQALSILKHLKSYRRISPPVDLEYQYMLEHVITLPSAAQTRLPFHLIFFGTAQNFWKILSTELSEESFPTLLLISKLMKFSLDTLYVSTAKHVFEKKLKPKLLKLTQAKSSTLINKEITKITQTIESCLLSIVNPEWAVAIAISLAQDIPEGSFKISALKFCLYLAERWLQNIPSQDEKREKAEALLKKLHIQYRRSGTEAVLIAHKLNTEEYLRVIGKPAHLIVSLYEHPSINQRIQNSSGTDYPDIHAAAKEIAEVNEINLEKVWDMLLEKWLCPSTKPGEKPSELFELQEDEALRRVQYLLLSRPIDYSSRMLFVFATSTTTTLGMHQLTFAHRTRALQCLFYLADKETIESLFKKPIEEVKSYLRCITFLASFETLNIPITYELFCSSPKEGMIKGLWKNHSHESMAVRLVTELCLEYKIYDLQLWNGLLQKLLGFNMIPYLRKVLKAISSIHSLWQVPYFSKAWQRVIQIPLLSASCPLSPDQLSDCSESLIAVLECPVSGDLDLIGVARQYIQLELPAFALACLMLMPHSEKRHQQIKNFLGSCDPQVILKQLEEHMNTGQLAGFSHQIRSLILNNIINKKEFGILAKTKYFQMLKMHAMNTNNITELVNYLANDLSLDEASVLITEYSKHCGKPVPPDTAPCEILKMFLSGLS

SEQ ID NO: 1904 - protein, 197 aa, Homo sapiens
MQRASRLKRELHMLATEPPPGITCWQDKDQMDDLRAQILGGANTPYEKGVFKLEVIIPERYPFEPPQIRFLTPIYHPNIDSAGRICLDVLKLPPKGAWRPSLNIATVLTSIQLLMSEPNPDDPLMADISSEFKYNKPAFLKNARQWTEKHARQKQKADEEEMLDNLPEAGDSRVHNSTQKRKASQLVGIEKKFHPDV

SEQ ID NO: 1905 - protein, 202 aa, Homo sapiens
MATLIYVDKENGEPGTRVVAKDGLKLGSGPSIKALDGRSQVSTPRFGKTFDAPPALPKATRKALGTVNRATEKSVKTKGPLKQKQPSFSAKKMTEKTVKAKSSVPASDDAYPEIEKFFPFNPLDFESFDLPEEHQIAHLPLSGVPLMILDEERELEKLFQLGPPSPVKMPSPPWESNLLQSPSSILSTLDVELPPVCCDIDI

SEQ ID NO: 1906 - protein, 464 aa, Homo sapiens
METLSFPRYNIAEIVVHIRNKLLTGADGKNLSKSDFLPNPKPEVLYMIYMRALQLVYGVRLEHFYMMPVNIEVMYPHIMEGFLPVSNLFFHLDSFMPICRVNDFEIADILYPKANRTSRFLSGIINFIHFRETCLEKYEEFLLQNKSSVDKIQQLSNAHQEALMKLEKLNSVPVEEQEEFKQLKDDIQELQHLLNQDFRQKTTLLQERYTKMKSDFSEKTKHVNELKLSVVSLKEVQDSLKSKIVDSPEKLKNYKEKMKDTVQKLRSAREEVMEKYDIYRDSVDCLPSCQLEVQLYQKKSQDLADNREKLSSILKESLNLEGQIDSDSSELKKLKTEENSLIRLMTLKKERLATMQFKINKKQEDVKQYKRTMIEDCNKVQEKRDAVCEQVTAINQDIHKIKSGIQQLRDAEKREKLKSQEILVDLKSALEKYHEGIEKTTEECCTRIGGKTAELKRRMFKMPP

SEQ ID NO: 1907 - protein, 168 aa, Homo sapiens
MAEPWGNELASAAARGDLEQLTSLLQNNVNVNAQNGFGRTALQVMKLGNPEIARRLLLRGANPDLKDRTGFAVIHDAARAGFLDTLQTLLEFQADVNIEDNEGNLPLHLAAKEGHLRVVEFLVKHTASNVGHRNHKGDTACDLARLYGRNEVVSLMQANGAGGATNLQ

SEQ ID NO: 1908 - protein, 156 aa, Homo sapiens
MEPAAGSSMEPSADWLATAAARGRVEEVRALLEAGALPNAPNSYGRRPIQVMMMGSARVAELLLLHGAEPNCADPATLTRPVHDAAREGFLDTLVVLHRAGARLDVRDAWGRLPVDLAEELGHRDVARYLRAAAGGTRGSNHARIDAAEGPSDIPD

SEQ ID NO: 1909 - protein, 125 aa, Homo sapiens
MKKSGVLFLLGIILLVLIGVQGTPVVRKGRCSCISTNQGTIHLQSLKDLKQFAPSPSCEKIEIIATLKNGVQTCLNPDSADVKELIKKWEKQVSQKKKQKNGKKHQKKKVLKVRKSQRSRQKKTT

SEQ ID NO: 1910 - DNA, 931 bp, Homo sapiens
caacagtcagaggtcgcgcaggcgctggtaccccgttggtccgcgcgttgctgcgttgtgaggggtgtcagctcagtgcatcccaggcagctcttagtgtggagcagtgaactgtgtgtggttccttctacttggggatcatgcagagagcttcrcgtctgaagagagagctgcacatgttagccacagagccacccccaggcatcacatgttggcaagataaagaccaaatggatgacctgcgagctcaaatattaggtggagccaacacaccttatgagaaaggtgtttttaagctagaagttatcattcctgagaggtacccatttgaacctcctcagatccgatttctcactccaatttatcatccaaacattgattctgctggaaggatttgtctggatgttctcaaattgccaccaaaaggtgcttggagaccatccctcaacatcgcaactgtgttgacctctattcagctgctcatgtcagaacccaaccctgatgacccgctcatggctgacatatcctcagaatttaaatataataagccagccttcctcaagaatgccagacagtggacagagaagcatgcaagacagaaacaaaaggctgatgaggaagagatgcttgataatctaccagaggctggtgactccagagtacacaactcaacacagaaaaggaaggccagtcagctagtaggcatagaaaagaaatttcatcctgatgtttaggggacttgtcctggttcatcttagttaatgtgttctttgccaaggtgatctaagttgcctaccttgaatttttttttaaatatatttgatgacataatttttgtgtagtttatttatcttgtacatatgtattttgaaatcttttaaacctgaaaaataaatagtcatttaatgttgaaaaaaaaaaaaaaaaaaaa

SEQ ID NO: 1911 - DNA, 27 bp, Artificial Sequence
  PCR primer
gctaaaggtgaccccaagaaaccaaag

SEQ ID NO: 1912 - DNA, 37 bp, Artificial Sequence; identical to SEQ ID NO: 1666
  PCR primer

SEQ ID NO: 1913 - protein, 207 aa, Homo sapiens; identical to SEQ ID NO: 1667

SEQ ID NO: 1914 - DNA, 624 bp, Homo sapiens
atgcagcatcaccaccatcaccacgctaaaggtgaccccaagaaaccaaagggcaagatgtccgcttatgccttctttgtgcagacatgcagagaagaacataagaagaaaaacccagaggtccctgtcaattttgcggaattttccaagaagtgctctgagaggtggaagacgatgtccgggaaagagaaatctaaatttgatgaaatggcaaaggcagataaagtgcgctatgatcgggaaatgaaggattatggaccagctaagggaggcaagaagaagaaggatcctaatgctcccaaaaggccaccgtctggattcttcctgttctgttcagaattccgccccaagatcaaatccacaaaccccggcatctctattggagacgtggcaaaaaagctgggtgagatgtggaataatttaaatgacagtgaaaagcagccttacatcactaaggcggcaaagctgaaggagaagtatgagaaggatgttgctgactataagtcgaaaggaaagtttgatggtgcaaagggtccagctaaagttgcccggaaaaaggtggaagaggaagatgaagaagaggaggaggaagaagaggaggaggaggaggaggaggatgaataa

SEQ ID NO: 1915 - DNA, 28 bp, Artificial Sequence
  PCR primer
gtgacgatggaggagctgcgggagatgg

SEQ ID NO: 1916 - DNA, 30 bp, Artificial Sequence
  PCR primer
cgcctaactcgagtcactaacagctgggag

SEQ ID NO: 1917 - protein, 401 aa, Homo sapiens
MQHHHHHHVTMEELREMDCSVLKRLMNRDENGGGAGGSGSHGTLGLPSGGKCLLLDCRPFLAHSAGYILGSVNVRCNTIVRRRAKGSVSLEQILPAEEEVRARLRSGLYSAVIVYDERSPRAESLREDSTVSLVVQALRRNAERTDICLLKGGYERFSSEYPEFCSKTKALAAIPPPVPPSATEPLDLGCSSCGTPLHDQGGPVEILPFLYLGSAYHAARRDMLDALGITALLNVSSDCPNHFEGHYQYKCIPVEDNHKADISSWFMEAIEYIDAVKDCRGRVLVHCQAGISRSATICLAYLMMKKRVRLEEAFEFVKQRRSIISPNFSFMGQLLQFESQVLATSCAAEAASPSGPLRERGKTPATPTSQFVFSFPVSVGVHSAPSSLPYLHSPITTSPSC

SEQ ID NO: 1918 - DNA, 1209 bp, Homo sapiens
atgcagcatcaccaccatcaccacgtgacgatggaggagctgcgggagatggactgcagtgtgctcaaaaggctgatgaaccgggacgagaatggcggcggcgcgggcggcagcggcagccacggcaccctggggctgccgagcggcggcaagtgcctgctgctggactgcagaccgttcctggcgcacagcgcgggctacatcctaggttcggtcaacgtgcgctgtaacaccatcgtgcggcggcgggctaagggctccgtgagcctggagcagatcctgcccgccgaggaggaggtacgcgcccgcttgcgctccggcctctactcggcggtcatcgtctacgacgagcgcagcccgcgcgccgagagcctccgcgaggacagcaccgtgtcgctggtggtgcaggcgctgcgccgcaacgccgagcgcaccgacatctgcctgctcaaaggcggctatgagaggttttcctccgagtacccagaattctgttctaaaaccaaggccctggcagccatcccacccccggttccccccagtgccacagagcccttggacctgggctgcagctcctgtgggaccccactacacgaccaggggggtcctgtggagatccttcccttcctctacctcggcagtgcctaccatgctgcccggagagacatgctggacgccctgggcatcacggctctgttgaatgtctcctcggactgcccaaaccactttgaaggacactatcagtacaagtgcatcccagtggaagataaccacaaggccgacatcagctcctggttcatggaagccatagagtacatcgatgccgtgaaggactgccgtgggcgcgtgctggtgcactgccaggcgggcatctcgcggtcggccaccatctgcctggcctacctgatgatgaagaaacgggtgaggctggaggaggccttcgagttcgttaagcagcgccgcagcatcatctcgcccaacttcagcttcatggggcagctgctgcagttcgagtcccaggtgctggccacgtcctgtgctgcggaggctgctagcccctcgggacccctgcgggagcggggcaagacccccgccacccccacctcgcagttcgtcttcagctttccggtctccgtgggcgtgcactcggcccccagcagcctgccctacctgcacagccccatcaccacctctcccagctgttagtga

SEQ ID NO: 1919 - DNA, 23 bp, Artificial Sequence
  PCR primer
cggtgccacgcccatggaccttc

SEQ ID NO: 1920 - DNA, 35 bp, Artificial Sequence
  PCR primer
ctgagaattcattaaacttgtggttgctcttcacc

SEQ ID NO: 1921 - protein, 167 aa, Homo sapiens [sequence omitted]

SEQ ID NO: 1922 - DNA, 507 bp, Homo sapiens
atgcagcatcaccaccatcaccaccggtgccacgcccatggaccttcttgtctcgtcacggccataactagggaggaaggagggccgaggagtggaggggctcaggcgaagctggggtgctgttgggggtatccgagtcccagaagcacctggaaccccgacagaagattctggactccccagacgggaccaggagagggacggcatgagcgacacacacaaacacagaaccacacagccagtcccaggagcccagtaatggagagccccaaaaagaagaaccagcagctgaaagtcgggatcctacacctgggcagcagacagaagaagatcaggatacagctgagatcccagtgcgcgacatggaaggtgatctgcaagagctgcatcagtcaaacaccggggataaatctggatttgggttccggcgtcaaggtgaagataatacctaaagaggaacactgtaaaatgccagaagcaggtgaagagcaaccacaagtttaatga

SEQ ID NO: 1923 - DNA, 3192 bp, Homo sapiens
cccacgcgtccggcggtcgccgcgggatttggagctgcctagcctcgcggtcgctttggcagcatgtaagcagctgtttgccaagaacccaggtcactgctaagaaagggtgccttcgggagaagagtgtccagaggataccaatgccagatgcatctggagttacactcagcactcgcagtatgagacattgtgtgccagcatctctttccttctggcaaagactgtagctctccaggtaggaggatcctggaagctgtgagcaccaggagccttgccagaggaggatggggccagatatgaactctctaccatgaacatggttctcggcttatgaaggaattttaagtaaaacagttatttaatttccacatattcaagtcaaaagccttctgtgtgaagtgccagtgattacccctccacaggagttatcaggatttttctggcaccaagtttaattcttcttcgtacttctggtagtgacagatctgcagggcagatttatctgttgaatgctcttgggcaggaaaaccatgtaaaacctctggaagcagcatcaggacagcagagcagagcccccgtcctcactgctcacttgcacagaaactccatctggactcggatgcttttactgaagacccatctagcttcaatcatctttagagtccatccattctggagagacctggcgtttgcagttgcctcctgtggccgtgtttttctgtcattctgttcccaggccttctattcaggcggttgaagggtgtggactttggaatggggtttgctgttcttcgggaacttgcttcctttccctggctggtgctgtcaggaaggaccatctgaaggctgcaatttgttcttagggaggcaggtgctggcctggcctggatcttccaccatgttcctgttgctgccttttgatagcctgattgtcaaccttctgggcatctccctgactgtcctcttcaccctccttctcgttttcatcatagtgccagccatttttggagtctcctttggtatccgcaaactctacatgaaaagtctgttaaaaatctttgcgtgggctaccttgagaatggagcgaggagccaaggagaagaaccaccagctttacaagccctacaccaacggaatcattgcaaaggatcccacttcactagaagaagagatcaaagagattcgtcgaagtggtagtagtaaggctctggacaacactccagagttcgagctctctgacattttctacttttgccggaaaggaatggagaccattatggatgatgaggtgacaaagagattctcagcagaagaactggagtcctggaacctgctgagcagaaccaattataacttccagtacatcagccttcggctcacggtcctgtgggggttaggagtgctgattcggtactgctttctgctgccgctcaggatagcactggctttcacagggattagccttctggtggtgggcacaactgtggtgggatacttgccaaatgggaggtttaaggagttcatgagtaaacatgttcacttaatgtgttaccggatctgcgtgcgagcgctgacagccatcatcacctaccatgacagggaaaacagaccaagaaatggtggcatctgtgtggccaatcatacctcaccgatcgatgtgatcatcttggccagcgatggctattatgccatggtgggtcaagtgcacgggggactcatgggtgtgattcagagagccatggtgaaggcctgcccacacgtctggtttgagcgctcggaagtgaaggatcgccacctggtggctaagagactgactgaacatgtgcaagataaaagcaagctgcctatcctcatcttcccagaaggaacctgcatcaataatacatcggtgatgatgttcaaaaagggaagttttgaaattggagccacagtttaccctgttgctatcaagtatgaccctcaatttggcgatgccttctggaacagcagcaaatacgggatggtgacgtacctgctgcgaatgatgaccagctgggccattgtctgcagcgtgtggtacctgcctcccatgactagagaggcagatgaagatgctgtccagtttgcgaatagggtgaaatctgccattgccaggcagggaggacttgtggacctgctgtgggatgggggcctgaagagggagaaggtgaaggacacgttcaaggaggagcagcagaagctgtacagcaagatgatcgtggggaaccacaaggacaggagccgctcctgagcctgcctccagctggctggggccaccgtgcggggtgccaacgggctcagagctggagttgccgccgccgcccccactgctgtgtcctttccagactccagggctccccgggctgctctggatcccaggactccggctttcgccgagccgcagcgggatccctgtgcacccggcgcagctacccttggtggtctaaacggatgctgctgggtgttgcgacccaggacgagatgccttgtttcttttacaataagtcgttggaggaatgccattaaagtgaactccccacctttgcacgctgtgcgggctgagtggttggggagatgtggccatggtcttgtgctagagatggcggtacaagagtctgttatgcaagcccgtgtgccagggatgtgctgggggcggccacccgctctccaggaaaggcacagctgaggcactgtggctggcttcggcctcaacatcgcccccagccttggagctctgcagacatgataggaaggaaactgtcatctgcaggggctttcagcaaaatgaagggttagatttttatgctgctgctgatggggttactaaagggaggggaagaggccaggtgggccgctgactgggccatggggagaacgtgtgttcgtactccaggctaaccctgaactccccatgtgatgcgcgctttgttgaatgtgtgtctcggtttccccatctgtaatatgagtcggggggaatggtggtgattcctacctcacagggctgttgtggggattaaagtgctgcgggtgagtgaaggacacatcacgttcagtgtttcaagtacaggcccacaaaacggggcacggcaggcctgagctcagagctgctgcactgggctttggatttgttcttgtgagtaaataaaactggctggtgaatgaaaaaaaaaa

SEQ ID NO: 1924 - DNA, 2048 bp, Homo sapiens
  misc_feature 787, 1453, 1521, 1727: n = A,T,C or G
gccggaagcgcgcggagaccatgtagtgagaccctcgcgaggtctgagagtcactggagctaccagaagcatcatggggccctggggagagccagagctcctggtgtggcgccccgaggcggtagcttcagagcctccagtgcctgtggggctggaggtgaagttgggggccctggtgctgctgctggtgctcaccctcctctgcagccttggttccatcggtgtgctgcgccggacaggagctaatcatgaaggctcagcttcccgccagaaagccctgagcctagtaagctgtttcgcggggggcgtctttttggccacttgtctcctggacctgctgcctgactacctggctgccatagatgaggccctggcagccttgcacgtgacgctccagttcccactgcaagagttcatcctggccatgggcttcttcctggtcctggtgatggagcagatcacactggcttacaaggagcagtcagggccgtcacctctggaggaaacaagggctctgctgggaacagtgaatggtgggccgcagcattggcatgatgggccaggggtcccacaggcgagtggagccccagcaaccccctcagccttgcgtgcctgtgtactggtgttctccctggccctccactccgtgttcgaggggctggcggtagggctgcagcgagaccgggctcgggccatggagctgtgcctggctttgctgctccacaagggcatcctggctgtcagcctgtccctgcggctgttgcagagccaccttagggcacaggtngtggctggctgtgggatcctgttctcatgcatgacacctctaggcatcgggctgggtgcagctctggcagagtcggcaggacctctgcaccagctggcccagtctgtgctagagggcatggcagctggcacctttctctatatcacctttctggaaatcctgccccaggagctggccagttctgagcaaaggatcctcaaggtcattctgctcctagcaggctttgccctgctcactggcctgctcttcatccaaatctagggggcttcaagagaggggcaggggagattgatgatcaggtgcccctgttctcccttccctcccccagttgtggggaataggaaggaaaggggaagggaaatactgaggaccaaaaagttctctgggagctaaagatagagcctttggggctatctgactaatgagagggaagtgggcagacaagaggctggccccagtcccaaggaacaagagatggtcaagtcgctagagacatatcaggggacattaggattggggaagacacttgactgctagaatcagaggttggacactatacataaggacaggctcacatgggaggctggaggtgggtacccagctgctgtggaacgggtatggacaggtcataaacctagagtcagtgtcctgttggtcctdvgcccnatttcagcaccctgccacttggagtggacccctcctactcttcttagcgcctaccctcatacctatcntccctcctcccatctcctagggactggcgccaaatggtctctccctgccaattttggtatcttctctggcctctccagtcctgcttactcctctatttttaaagtgccaaacaaatccccttcctctttctcaaagcacagtaatgtggcactgagccctacccagcacctcagtgaagggggcctgcttgcctttttttttgttncccggatcctggggtggggcagaaatattttctgggctggggtaggaggaaggttgttagcatctactgctgccgtaccctaggaatatggggacatggacatggtgtcccatgcccagatgataaacactgagctgccaaaacatttttttaaatacacccgaggagcccaagggggaagggcaatgcctacccccagcgttatttttggggagggagggctgtgcatagggacatattctttagaatctattttattaactgacctgttttgggacctgttacccaaataaaagatgtttctagacaaaaaaaaaaaaa

SEQ ID NO: 1925 - protein, 456 aa, Homo sapiens
MFLLLPFDSLIVNLLGISLTVLFTLLLVFIIVPAIFGVSFGIRKLYMKSLLKIFAWATLRMERGAKEKNHQLYKPYTNGIIAKDPTSLEEEIKEIRRSGSSKALDNTPEFELSDIFYFCRKGMETIMDDEVTKRFSAEELESWNLLSRTNYNFQYISLRLTVLWGLGVLIRYCFLLPLRIALAFTGISLLVVGTTVVGYLPNGRFKEFMSKHVHLMCYRICVRALTAIITYHDRENRPRNGGICVANHTSPIDVIILASDGYYAMVGQVHGGLMGVIQRAMVKACPHVWFERSEVKDRHLVAKRLTEHVQDKSKLPILIFPEGTCINNTSVMMFKKGSFEIGATVYPVAIKYDPQFGDAFWNSSKYGMVTYLLRMMTSWAIVCSVWYLPPMTREADEDAVQFANRVKSAIARQGGLVDLLWDGGLKREKVKDTFKEEQQKLYSKMIVGNHKDRSRS

SEQ ID NO: 1926 - protein, 324 aa, Homo sapiens
MGPWGEPELLVWRPEAVASEPPVPVGLEVKLGALVLLLVLTLLCSLGSIGVLRRTGANHEGSASRQKALSLVSCFAGGVFLATCLLDLLPDYLAAIDEALAALHVTLQFPLQEFILAMGFFLVLVMEQITLAYKEQSGPSPLEETRALLGTVNGGPQHWHDGPGVPQASGAPATPSALRACVLVFSLALHSVFEGLAVGLQRDRARAMELCLALLLHKGILAVSLSLRLLQSHLRAQVVAGCGILFSCMTPLGIGLGAALAESAGPLHQLAQSVLEGMAAGTFLYITFLEILPQELASSEQRILKVILLLAGFALLTGLLFIQI

SEQ ID NO: 1927 - protein, 15 aa, Homo sapiens
GPRSGGAQAKLGCCW

SEQ ID NO: 1928 - protein, 20 aa, Homo sapiens
KVICKSCISQTPGINLDLGS

SEQ ID NO: 1929 - protein, 20 aa, Homo sapiens
IIPKEEHCKMPEAGEEQPQV

SEQ ID NO: 1930 - protein, 24 aa, Homo sapiens
LSIPHPYAYPDYYPYAWFGVNPGM

SEQ ID NO: 1931 - DNA, 1526 bp, Homo sapiens
actggaacatttttacatgatgccagtgaactctgaagtcatgtatccacatttaatggaaggcttcttaccattcagcaatttagttactcatctggactcatttttgcctatctgccgggtgaatgactttgagactgctgatattctatgtccaaaagcaaaacggacaagtcggtttttaagtggcattatcaactttattcacttcagagaagcatgccgtgaaacgtatatggaatttctttggcaatataaatcctctgcggacaaaatgcaacagttaaacgccgcacaccaggaggcattaatgaaactggagagacttgattctgttccagttgaagagcaagaagagttcaagcagctttcagatggaattcaggagctacaacaatcactaaatcaggattttcatcaaaaaacgatagtgctgcaagagggaaattcccaaaagaagtcaaatatttcagagaaaaccaagcgtttgaatgaactaaaattgttggtggtttctttgaaagaaatacaagagagtttgaaaacaaaaattgtggattctccagagaagttaaagaattataaagaaaaaatgaaagatacggtccagaagcttaaaaatgccagacaagaagtggtggagaaatatgaaatctatggagactcagttgactgcctgccttcatgtcagttggaagtgcagttatatcaaaagaaaatacaggacctttcagataatagggaaaaattagccagtatcttaaaggagagcctgaacttggaggaccaaattgagagtgatgagtcagaactgaagaaattgaagactgaagaaaattcgttcaaaagactgatgattgtgaagaaggaaaaacttgccacagcacaattcaaaataaataagaagcatgaagatgttaagcaatacaaacgcacagtaattgaggattgcaataaagttcaagaaaaaagaggtgctgtctatgaacgagtaaccacaattaatcaagaaatccaaaaaattaaacttggaattcaacaactaaaagatgctgctgaaagggagaaactgaagtcccaggaaatatttctaaacttgaaaactgctttggagaaataccacgacggtattgaaaaggcagcagaggactcctatgctaagatagatgagaagacagctgaactgaagaggaagatgttcaaaatgtcaacctgattaacaaaattacatgtctttttgtaaatggcttgccatcttttaattttctatttagaaagaaaagttgaagcgaatggaagtatcagaagtaccaaataatgttggcttcatcagtttttatacactctcataagtagttaataagatgaatttaatgtaggcttttattaatttataattaaaataacttgtgcagctattcatgtctctactctgccccttgttgtaaatagtttgagtaaaacaaaactagttacctttgaaatatatatatttttttctgttaaaaaaaaaaaaaaaaaaaaaa

SEQ ID NO: 1932 - protein, 404 aa, Homo sapiens
LEHFYMMPVNSEVMYPHLMEGFLPFSNLVTHLDSFLPICRVNDFETADILCPKAKRTSRFLSGIINFIHFREACRETYMEFLWQYKSSADKMQQLNAAHQEALMKLERLDSVPVEEQEEFKQLSDGIQELQQSLNQDFHQKTIVLQEGNSQKKSNISEKTKRLNELKLLVVSLKEIQESLKTKIVDSPEKLKNYKEKMKDTVQKLKNARQEVVEKYEIYGDSVDCLPSCQLEVQLYQKKIQDLSDNREKLASILKESLNLEDQIESDESELKKLKTEENSFKRLMIVKKEKLATAQFKINKKHEDVKQYKRTVIEDCNKVQEKRGAVYERVTTINQEIQKIKLGIQQLKDAAEREKLKSQEIFLNLKTALEKYHDGIEKAAEDSYAKIDEKTAELKRKMFKMST

SEQ ID NO: 1933 - DNA, 1836 bp, Homo sapiens
ggcacgagggcaagtttgaaaagtgatgacggttgacgtttgctgatttttgactttgcttgtagctgctccccgaactcgccgtcttcctgtcggcggccggcactgtagattaacaggaaacttccaagatggaaactttgtctttccccagatataatgtagctgagattgtgattcatattcgcaataagatcttaacaggagctgatggtaaaaacctcaccaagaatgatctttatccaaatccaaagcctgaagtcttgcacatgatctacatgagagccttacaaatagtatatggaattcgactggaacatttttacatgatgccagtgaactctgaagtcatgtatccacatttaatggaaggcttcttaccattcagcaatttagttactcatctggactcatttttgcctatctgccgggtgaatgactttgagactgctgatattctatgtccaaaagcaaaacggacaagtcggtttttaagtggcattatcaactttattcacttcagagaagcatgccgtgaaacgtatatggaatttctttggcaatataaatcctctgcggacaaaatgcaacagttaaacgccgcacaccaggaggcattaatgaaactggagagacttgattctgttccagttgaagagcaagaagagttcaagcagctttcagatggtattcaggagctacaacaatcactaaatcaggattttcatcaaaaaacgatagtgctgcaagagggaaattcccaaaagaagtcaaatatttcagagaaaaccaagcgtttgaatgaactaaaattgttggtggtttctttgaaagaaatacaagagagtttgaaaacaaaaattgtggattctccagagaagttaaagaattataaagaaaaaatgaaagatacggtccagaagcttaaaaatgccagacaagaagtggtggagaaatatgaaatctatggagactcagttgactgcctgccttcatgtcagttggaagtgcagttatatcaaaagaaaatacaggacctttcagataatagggaaaaattagccagtatcttaaaggagagcctgaacttggaggaccaaattgagagtgatgagtcagaactgaagaaattgaagactgaagaaaattcgttcaaaagactgatgattgtgaagaaggaaaaacttgccacagcacaattcaaaataaataagaagcatgaagatgttaagcaatacaaacgcacagtaattgaggattgcaataaagttcaagaaaaaagaggtgctgtctatgaacgagtaaccacaattaatcaagaaatccaaaaaattaaacttggaattcaacaactaaaagatgctgctgaaagggagaaactgaagtcccaggaaatatttctaaacttgaaaactgctttggagaaataccacgacggtattgaaaaggcagcagaggactcctatgctaagatagatgagaagacagctgaactgaagaggaagatgttcaaaatgtcaacctgattaacaaaattacatgtctttttgtaaatggcttgccatcttttaattttctatttagaaagaaaagttgaagcgaatggaagtatcagaagtaccaaataatgttggcttcatcagtttttatacactctcataagtagttaataagatgaatttaatgtaggcttttattaatttataattaaaataacttgtgcagctattcatgtctctactctgccccttgttgtaaatagtttgagtaaaacaaaactagttacctttgaaatatatatatttttttctgttaaaaaaaaaaaaaaaaaaaaaa

SEQ ID NO: 1934 - protein, 464 aa, Homo spaiens
METLSFPRYNVAEIVIHIRNKILTGADGKNLTKNDLYPNPKPEVLHMIYMRALQIVYGIRLEHFYMMPVNSEVMYPHLMEGFLPFSNLVTHLDSFLPICRVNDFETADILCPKAKRTSRFLSGIINFIHFREACRETYMEFLWQYKSSADKMQQLNAAHQEALMKLERLDSVPVEEQEEFKQLSDGIQELQQSLNQDFHQKTIVLQEGNSQKKSNISEKTKRLNELKLLVVSLKEIQESLKTKIVDSPEKLKNYKEKMKDTVQKLKNARQEVVEKYEIYGDSVDCLPSCQLEVQLYQKKIQDLSDNREKLASILKESLNLEDQIESDESELKKLKTEENSFKRLMIVKKEKLATAQFKINKKHEDVKQYKRTVIEDCNKVQEKRGAVYERVTTINQEIQKIKLGIQQLKDAAEREKLKSQEIFLNLKTALEKYHDGIEKAAEDSYAKIDEKTAELKRKMFKMST

SEQ ID NO: 1935 - DNA, 26 bp, Artificial Sequence
  PCR primer
ctatgttggcatgcggtgccacgccc

SEQ ID NO: 1936 - DNA, 32 bp, Artificial Sequence
  PCR primer
cacgcctaagatcttcattaaacttgtggttg

SEQ ID NO: 1937 - protein, 159 aa, Homo sapiens
RCHAHGPSCLVTAITREEGGPRSGGAQAKLGCCWGYPSPRSTWNPDRRFWTPQTGPGEGRHERHTQTQNHTASPRSPVMESPKKKNQQLKVGILHLGSRQKKIRIQLRSQCATWKVICKSCISQTPGINLDLGSGVKVKIIPKEEHCKMPEAGEEQPQV

SEQ ID NO: 1938 - DNA, 486 bp, Homo sapiens
atgcggtgccacgcccatggaccttcttgtctcgtcacggccataactagggaggaaggagggccgaggagtggaggggctcaggcgaagctggggtgctgttgggggtatccgagtcccagaagcacctggaaccccgacagaagattctggactccccagacgggaccaggagagggacggcatgagcgacacacacaaacacagaaccacacagccagtcccaggagcccagtaatggagagccccaaaaagaagaaccagcagctgaaagtcgggatcctacacctgggcagcagacagaagaagatcaggatacagctgagatcccagtgcgcgacatggaaggtgatctgcaagagctgcatcagtcaaacaccggggataaatctggatttgggttccggcgtcaaggtgaagataatacctaaagaggaacactgtaaaatgccagaagcaggtgaagagcaaccacaagtttaatga

SEQ ID NO: 1939 - DNA, 28 bp, Artificial Sequence
  PCR primer
ctatgttgcatatatgcggtgccacgcc

SEQ ID NO: 1940 - protein, 160 aa, Homo sapiens; identical to SEQ ID NO: 809

SEQ ID NO: 1941 - DNA, 486 bp, Homo sapiens; identical to SEQ ID NO: 1938

SEQ ID NO: 1942 - protein, 19 aa, Homo sapiens
LGCCWGYPSPRSTWNDRPF

SEQ ID NO: 1943 - protein, 20 aa, Homo sapiens
CSLGVFPSAPSPVWGTRRSC

SEQ ID NO: 1944 - protein, 20 aa, Homo sapiens
ILSPLLRHGGHTQTQNHTAS

SEQ ID NO: 1945 - protein, 20 aa, Homo sapiens
MRCHAHGPSCLVTAITREEG

SEQ ID NO: 1946 - protein, 20 aa, Homo sapiens
HGPSCLVTAITREEGGPRSG

SEQ ID NO: 1947 - protein, 20 aa, Homo sapiens
LVTAITREEGGPRSGGAQAK

SEQ ID NO: 1948 - protein, 20 aa, Homo sapiens
TREEGGPRSGGAQAKLGCCW

SEQ ID NO: 1949 - protein, 20 aa, Homo sapiens
GPRSGGAQAKLGCCWGYPSP

SEQ ID NO: 1950 - protein, 20 aa, Homo sapiens
GAQAKLGCCWGYPSPRSTWN

SEQ ID NO: 1951 - protein, 20 aa, Homo sapiens
LGCCWGYPSPRSTWNPDRRF

SEQ ID NO: 1952 - protein, 20 aa, Homo sapiens
GYPSPRSTWNPDRRFWTPQT

SEQ ID NO: 1953 - protein, 20 aa, Homo sapiens
RSTWNPDRRFWTPQTGPGEG

SEQ ID NO: 1954 - protein, 20 aa, Homo sapiens
PDRRFWTPQTGPGEGRHERH

SEQ ID NO: 1955 - protein, 20 aa, Homo sapiens
WTPQTGPGEGRHERHTQTQN

SEQ ID NO: 1956 - protein, 20 aa, Homo sapiens
GPGEGRHERHTQTQNHTASP

SEQ ID NO: 1957 - protein, 20 aa, Homo sapiens
RHERHTQTQNHTASPRSPVM

SEQ ID NO: 1958 - protein, 20 aa, Homo sapiens
TQTQNHTASPRSPVMESPKK

SEQ ID NO: 1959 - protein, 20 aa, Homo sapiens
HTASPRSPVMESPKKKNQQL

SEQ ID NO: 1960 - protein, 20 aa, Homo sapiens
RSPVMESPKKKNQQLKVGIL

SEQ ID NO: 1961 - protein, 20 aa, Homo sapiens
ESPKKKNQQLKVGILHLGSR

SEQ ID NO: 1962 - protein, 20 aa, Homo sapiens
KNQQLKVGILHLGSRQKKIR

SEQ ID NO: 1963 - protein, 20 aa, Homo sapiens
KVGILHLGSRQKKIRIQLRS

SEQ ID NO: 1964 - protein, 20 aa, Homo sapiens
HLGSRQKKIRIQLRSQCATW

SEQ ID NO: 1965 - protein, 21 aa, Homo sapiens
RQKKIRIQLRSQCATWKVICK

SEQ ID NO: 1966 - protein, 20 aa, Homo sapiens
IQLRSQCATWKVICKSCISQ

SEQ ID NO: 1967 - protein, 21 aa, Homo sapiens
SQCATWKVICKSCISQTPGIN

SEQ ID NO: 1968 - protein, 20 aa, Homo sapiens
KVICKSCISQTPGINLDLGS

SEQ ID NO: 1969 - protein, 20 aa, Homo sapiens
SCISQTPGINLDLGSGVKVK

SEQ ID NO: 1970 - protein, 20 aa, Homo sapiens
TPGINLDLGSGVKVKIIPKE

SEQ ID NO: 1971 - protein, 20 aa, Homo sapiens
LDLGSGVKVKIIPKEEHCKM

SEQ ID NO: 1972 - protein, 20 aa, Homo sapiens
GVKVKIIPKEEHCKMPEAGE

SEQ ID NO: 1973 - protein, 20 aa, Homo sapiens
IIPKEEHCKMPEAGEEQPQV

SEQ ID NO: 1974 - DNA, 60 bp, Homo sapiens
atgcggtgccacgcccatggaccttcttgtctcgtcacggccataactagggaggaagga

SEQ ID NO: 1975 - DNA, 60 bp, Homo sapiens
catggaccttcttgtctcgtcacggccataactagggaggaaggagggccgaggagtgga

SEQ ID NO: 1976 - DNA, 60 bp, Homo sapiens
ctcgtcacggccataactagggaggaaggagggccgaggagtggaggggctcaggcgaag

SEQ ID NO: 1977 - DNA, 60 bp, Homo sapiens
actagggaggaaggagggccgaggagtggaggggctcaggcgaagctggggtgctgttgg

SEQ ID NO: 1978 - DNA, 60 bp, Homo sapiens
gggccgaggagtggaggggctcaggcgaagctggggtgctgttgggggtatccgagtccc

SEQ ID NO: 1979 - DNA, 60 bp, Homo sapiens
ggggctcaggcgaagctggggtgctgttgggggtatccgagtcccagaagcacctggaac

SEQ ID NO: 1980 - DNA, 60 bp, Homo sapiens
ctggggtgctgttgggggtatccgagtcccagaagcacctggaaccccgacagaagattc

SEQ ID NO: 1981 - DNA, 60 bp, Homo sapiens
gggtatccgagtcccagaagcacctggaaccccgacagaagattctggactccccagacg

SEQ ID NO: 1982 - DNA, 60 bp, Homo sapiens
agaagcacctggaaccccgacagaagattctggactccccagacgggaccaggagaggga

SEQ ID NO: 1983 - DNA, 60 bp, Homo sapiens
cccgacagaagattctggactccccagacgggaccaggagagggacggcatgagcgacac

SEQ ID NO: 1984 - DNA, 60 bp, Homo sapiens
tggactccccagacgggaccaggagagggacggcatgagcgacacacacaaacacagaac

SEQ ID NO: 1985 - DNA, 60 bp, Homo sapiens
ggaccaggagagggacggcatgagcgacacacacaaacacagaaccacacagccagtccc

SEQ ID NO: 1986 - DNA, 61 bp, Homo sapiens
cggcatgagcgacacaacacaaacacagaaccacacagccagtcccaggagcccagtaatg

SEQ ID NO: 1987 - DNA, 60 bp, Homo sapiens
acacaaacacagaaccacacagccagtcccaggagcccagtaatggagagccccaaaaag

SEQ ID NO: 1988 - DNA, 60 bp, Homo sapiens
cacacagccagtcccaggagcccagtaatggagagccccaaaaagaagaaccagcagctg

SEQ ID NO: 1989 - DNA, 60 bp, Homo sapiens
aggagcccagtaatggagagccccaaaaagaagaaccagcagctgaaagtcgggatccta

SEQ ID NO: 1990 - DNA, 60 bp, Homo sapiens
gagagccccaaaaagaagaaccagcagctgaaagtcgggatcctacacctgggcagcaga

SEQ ID NO: 1991 - DNA, 60 bp, Homo sapiens
aagaaccagcagctgaaagtcgggatcctacacctgggcagcagacagaagaagatcagg

SEQ ID NO: 1992 - DNA, 60 bp, Homo sapiens
aaagtcgggatcctacacctgggcagcagacagaagaagatcaggatacagctgagatcc

SEQ ID NO: 1993 - DNA, 60 bp, Homo sapiens
cacctgggcagcagacagaagaagatcaggatacagctgagatcccagtgcgcgacatgg

SEQ ID NO: 1994 - DNA, 63 bp, Homo sapiens
agacagaagaagatcaggatacagctgagatcccagtgcgcgacatggaaggtgatctgcaag

SEQ ID NO: 1995 - DNA, 60 bp, Homo sapiens
atacagctgagatcccagtgcgcgacatggaaggtgatctgcaagagctgcatcagtcaa

SEQ ID NO: 1996 - DNA, 63 bp, Homo sapiens
tcccagtgcgcgacatggaaggtgatctgcaagagctgcatcagtcaaacaccggggataaat

SEQ ID NO: 1997 - DNA, 60 bp, Homo sapiens
aaggtgatctgcaagagctgcatcagtcaaacaccggggataaatctggatttgggttcc

SEQ ID NO: 1998 - DNA, 60 bp, Homo sapiens
agctgcatcagtcaaacaccggggataaatctggatttgggttccggcgtcaaggtgaag

SEQ ID NO: 1999 - DNA, 60 bp, Homo sapiens
acaccggggataaatctggatttgggttccggcgtcaaggtgaagataatacctaaagag

SEQ ID NO: 2000 - DNA, 60 bp, Homo sapiens
ctggatttgggttccggcgtcaaggtgaagataatacctaaagaggaacactgtaaaatg

SEQ ID NO: 2001 - DNA, 60 bp, Homo sapiens
ggcgtcaaggtgaagataatacctaaagaggaacactgtaaaatgccagaagcaggtgaa

SEQ ID NO: 2002 - DNA, 60 bp, Homo sapiens
ataatacctaaagaggaacactgtaaaatgccagaagcaggtgaagagcaaccacaagtt

SEQ ID NO: 2003 - DNA, 753 bp, Homo sapiens
atgaattcgatgacttcagcagttccggtggccaattctgtgttggtggtggcaccccacaatggttatcctgtgaccccaggaattatgtctcacgtgcccctgtatccaaacagccagccgcaagtccacctagttcctgggaacccacctagtttggtgtcgaatgtgaatgggcagcctgtgcagaaagctctgaaagaaggcaaaaccttgggggccatccagatcatcattggcctggctcacatcggcctcggctccatcatggcgacggttctcgtaggggaatacctgtctatttcattctacggaggctttcccttctggggaggcttgtggtttatcatttcaggatctctctccgtggcagcagaaaatcagccatattcttattgcctgctgtctggcagtttgggcttgaacatcgtcagtgcaatctgctctgcagttggagtcatactcttcatcacagatctaagtattccccacccatatgcctaccccgactattatccttacgcctggggtgtgaaccctggaatggcgatttctggcgtgctgctggtcttctgcctcctggagtttggcatcgcatgcgcatcttcccactttggctgccagttggtctgctgtcaatcaagcaatgtgagtgtcatctatccaaacatctatgcagcaaacccagtgatcaccccagaaccggtgacctcaccaccaagttattccagtgagatccaagcaaataagtaa

SEQ ID NO: 2004 - protein, 250 aa, Homo sapiens; identical to SEQ ID NO: 1677

SEQ ID NO: 2005 - protein, 20 aa, Homo sapiens
HLGSRQKKIRIQLRSQCATW

SEQ ID NO: 2006 - protein, 29 aa, Homo sapiens
TREEGGPRSGGAQAKLGCCWGYPSPRSTW

SEQ ID NO: 2007 - protein, 30 aa, Homo sapiens
RSPVMESPKKKNQQLKVGILHLGSRQKKIR

SEQ ID NO: 2008 - protein, 30 aa, Homo sapiens
IQLRSQCATWKVICKSCISQTPGINLDLGS

SEQ ID NO: 2009 - protein, 30 aa, Homo sapiens
SCISQTPGINLDLGSGVKVKIIPKEEHCKM

SEQ ID NO: 2010 - protein, 20 aa, Homo sapiens
RSAVEYIRALQQLLDEHDAV

SEQ ID NO: 2011 - protein, 20 aa, Homo sapiens
QQPFLPPAACFFATAAAAAA

What is claimed is:

1. A method for stimulating an immune response in a patient, comprising administering to the patient an effective amount of a composition comprising at least one component selected from the group consisting of:
(a) a polypeptide comprising an amino acid sequence set forth in any one of SEQ ID NOs:2005-2011, or an immunogenic fragment thereof;
(b) a polypeptide consisting of an amino acid sequence set forth in any one of SEQ ID NOs:2005-2011 or an immunogenic fragment thereof; and
(c) a polypeptide comprising an amino acid sequence having at least 90% identity to a polypeptide of (a) or (b);
wherein the polypeptide contains an amino acid sequence capable of stimulating a human T-cell response.

2. The method of claim 1 wherein the composition further comprises at least one adjuvant.

3. The method of claim 2 wherein the adjuvant is selected from the group consisting of Freund's Incomplete Adjuvant; Freund's Complete Adjuvant; Merck Adjuvant 65; AS-1, AS-2; aluminum hydroxide gel; aluminum phosphate; a salt of calcium, iron or zinc; an insoluble suspension of acylated tyrosine acylated sugars; cationically or anionically derivatized polysaccharides; polyphosphazenes; biodegradable microspheres; monophosphoryl lipid A, QS21, aminoalkyl glucosaminide 4-phosphates, and quil A.

4. A method for stimulating and/or expanding T cells specific for a tumor protein, comprising contacting T cells with at least one component selected from the group consisting of:
(a) a polypeptide comprising an amino acid sequence set forth in any one of SEQ ID NOs:2005-2011, or an immunogenic fragment thereof;
(b) a polypeptide consisting of an amino acid sequence set forth in any one of SEQ ID NOs:2005-2011 or an immunogenic fragment thereof;
(c) a polypeptide comprising an amino acid sequence having at least 90% identity to a polypeptide of (a) or (b);
(d) antigen-presenting cells pulsed with or expressing a polypeptide according to (a) (b), or (c);
under conditions and for a time sufficient to permit the stimulation and/or expansion of T cells.

5. An isolated T cell population, comprising T cells prepared according to the method of claim 4.

6. A method for the treatment of lung cancer in a patient, comprising administering to the patient an effective amount of a composition comprising the proliferated T cells according to claim 5.

7. A method for stimulating an immune response in a patient, comprising administering to the patient an effective amount of a composition comprising at least one component selected from the group consisting of:
(a) a polynucleotide comprising a sequence encoding a polypeptide set forth in any one of SEQ ID NOs:2005-2011, or an immunogenic fragment thereof;
(b) a polynucleotide consisting of a sequence encoding a polypeptide set forth in any one of SEQ ID NOs:2005-2011 or an immunogenic fragment thereof; and
(c) a polynucleotide comprising a sequence encoding a polypeptide sequence having at least 90% identity to a polypeptide of (a) or (b);
(d) wherein the polynucleotide encodes a polypeptide capable of stimulating a human T-cell response.

8. The method of claim 7 wherein the composition further comprises at least one adjuvant.

9. The method of claim 8 wherein the adjuvant is selected from the group consisting of Freund's Incomplete Adjuvant; Freund's Complete Adjuvant; Merck Adjuvant 65; AS-1, AS-2; aluminum hydroxide gel; aluminum phosphate; a salt of calcium, iron or zinc; an insoluble suspension of acylated tyrosine acylated sugars; cationically or anionically derivatized polysaccharides; polyphosphazenes; biodegradable microspheres; monophosphoryl lipid A, QS21, aminoalkyl glucosaminide 4-phosphates, and quil A.

10. A fusion protein comprising at least one polypeptide set forth in SEQ ID NOs:1921, 1937, 1920, and 2005-2011.

11. An expression vector comprising a polynucleotide encoding the fusion protein of claim 10 operably linked to an expression control element.

12. A host cell transformed or transfected with an expression vector according to claim 11.

13. An isolated antibody, or antigen-binding fragment thereof, that specifically binds to a polypeptide set forth in SEQ ID NOs:1921, 1937, and 1920.

14. The antibody or antigen-binding fragment thereof of claim 13 wherein said antibody or antigen-binding fragment thereof is a monoclonal antibody.

15. A diagnostic kit comprising at least one antibody according to claim 13 and a detection reagent, wherein the detection reagent comprises a reporter group.

16. A composition comprising a first component selected from the group consisting of physiologically acceptable carriers and immunostimulants, and a second component selected from the group consisting of:
(a) a polypeptide comprising an amino acid sequence set forth in any one of SEQ ID NOs:1921, 1937, 1920, and 2005-2011;
(b) fusion proteins according to claim 10;
(c) antibodies according to claim 13;
(d) T cell populations according to claim 5 and
(e) antigen presenting cells pulsed with or expressing a polypeptide according to (a).

17. A method for stimulating an immune response in a patient, comprising administering to the patient a composition of claim 16.

18. A method for the treatment of a lung cancer in a patient, comprising administering to the patient a composition of claim 16.
